(19) United States
(12) Patent Application Publication
(10) Pub. No.: US 2023/0174953 A1
(43) Pub. Date: Jun. 8, 2023

(54) DEFECTIVE INTERFERING VIRAL GENOMES

(71) Applicant: INSTITUT PASTEUR, PARIS CEDEX 15 (FR)

(72) Inventors: MARCO VIGNUZZI, Paris (FR); BJORN MEYER, Paris (FR); VERONICA REZELJ, Paris (FR); LAURA LEVI, Paris (FR); VERONIKA BERNHAUEROVA, Paris (FR); THOMAS VALLET, Paris (FR); TANGUY PIEPLU, Paris (FR); DJOSHKUN SHENGJULER, Paris (FR); STEPHANIE BEAUCOURT, Paris (FR); HERVE BLANC, Paris (FR); NATHALIE PARDIGON, Paris (FR); GIOVANNA BARBA-SPAETH, Paris (FR); MARIA-CARLA SALEH, Paris (FR)

(21) Appl. No.: 17/907,424

(22) PCT Filed: Mar. 26, 2021
(86) PCT No.: PCT/IB2021/000231

§ 371 Date: Sep. 27, 2022

Related U.S. Application Data
(60) Provisional application No. 63/000,998, filed on Mar. 27, 2020.

(51) Int. Cl. C12N 7/00

(52) U.S. Cl. CPC C12N 7/00; C12N 2770/20021; C12N 2770/20034; C12N 2770/32321; C12N 2770/32334; C12N 2770/32721; C12N 2770/32734; C12N 2770/36121; C12N 2770/36134

(57) ABSTRACT

Method for producing a defective interfering viral genome (DVG), defective interfering particles comprising the DVG, and methods and uses thereof.

[0001] A part of the invention was made with United States Government Support under Agreement No.: HR0011-17-2-0023 awarded by the Defense Advanced Research Projects Agency (DARPA). The United States Government has certain rights in the invention.

### INTRODUCTION

[0002] This invention was made with government support under DARPA agreement number HR00111720023 awarded by the Defense Advanced Research Projects Agency (DARPA).Viruses that possess an RNA genome have polymerases with an intrinsically high error rate. As a consequence of this error prone replication process, these viruses do not only generate full-length viral genomes or genomes with point mutations, but furthermore generate defective genomes. Various types of defective genomes have been described, which include truncations, insertions, deletions, mosaic or rearranged genomes and copyback/snapbacks. While the majority of defective genomes are thought to be dead-end side-products of RNA virus replication, a subset of these defective viral genomes (DVGs) interfere with the generation of infectious progeny virus particles to high numbers.

[0003] Along with high mutation rates, recombination is another main driving force of RNA virus evolution. Non-homologous recombination can give rise to truncated and/or rearranged viral genomes that constitute defective viral genomes (DVGs). First described in 1954 by Von Magnus in influenza A virus, DVGs have since been described in all viral families. Because they lack part of their genome or its encoded functions, DVGs must co-infect cells with their parental virus, in order to take advantage of the proteins encoded by the full-length virus. Hence, DVGs that hijack the replication machinery or use proteins encoded by the parental virus, may compete with wild type virus for resources, which can result in inhibition of the parental virus. These types of DVGs are often referred to as defective interfering particles (DIPs). Furthermore, many DVGs have a strong, immunostimulatory potential both in mammals and invertebrates. DVGs were identified in sera from patients suffering from acute dengue virus infection, but their pathophysiological role remains unknown. In humans, their presence correlates with milder disease and better outcome in influenza virus and respiratory syncytial virus infections. All these reasons justify renewed interest in using DVGs as antiviral therapy.

[0004] While DVGs have been described to exist for most viruses, DVGs were not considered to be relevant or predominant in in many virus families. Generally, only a few DVGs have been described for any given virus. These previous reports relied on more classic methods of isolation, such as PCR amplification, that select for only one or two DVGs and bias towards the shortest or most abundant DVGs. These DVGs are not necessarily the best candidates in terms of ability to compete with wild type virus. A need thus exists for reproducible and rational methods to identify and generate the best DVG candidates to compete and interfere with wild type virus infection, that could be applied to any virus of interest, especially human pathogens. The inventions disclosed herein meet these and other needs.

[0005] Our combined experimental evolution and computational approach identifies thousands of different DVGs for any virus. First, our experimental approach generates all possible DVGs in a virus population. Expectedly, our list includes DVGs that resemble those identified by more classic methods. Second, our computational analysis allows us to predict which DVGs would work best as defective interfering particles, using temporal frequencies estimated from the sequence data. Using this combined approach, we have generated a list of top candidates for a wide range of viruses belonging to different virus families, of which up to 90% have confirmed capacity to interfere with wild type virus replication.

### DESCRIPTION

[0006] This disclosure provides methods of generating DVGs and also provides new DVGs generated by the methods. DVGs generated from chikungunya virus (CHIKV), Zika virus (ZIKV), enterovirus 71 (EV71), West Nile virus (WNV), yellow fever virus (YFV) and rhinovirus (RV), and coronavirus (CV) (for example, the recently identified novel coronavirus named SARS-CoV-2, 2019-nCov or COVID-19) are provided.

[0007] The inventors have identified DVGs using next-generation sequencing methods followed by computational analysis, hotspot analysis identified a variety of DVGs that were deletion DVGs (internal deletions in the viral genomes of CHIKV, EV71, ZIKV as well as RV). Subsequently, these DVGs were genetically engineered and tested for their ability to reduce infectious viral titers of CHIKV, EV71, ZIKV as well as RV. Successful DVG candidates have the potential to be used as therapeutic interfering particles (TIPs), which could be used as a new strategy to treat and limit the severity of virus infections. Furthermore, DVGs for WNV and YFV were also identified. Based on success with other viruses, these DVGs have potential to be used as TIPs.

[0008] In a first aspect, a method for producing a defective interfering viral genome (DVG) is provided. The method comprises providing a first set of at least three replicate in vitro cell cultures, comprising a solid support and cells infected with a reference infectious virus at a high multiplicity of infection (MOI); providing a second set of at least three replicate in vitro cell cultures, comprising a solid support and cells infected with the reference infectious virus at a low multiplicity of infection (MOI); culturing the first and second sets of replicate in vitro cell cultures for at least 5 passages under normal growth conditions; collecting a plurality of DVG candidates from the medium of the first and second sets of in vitro replicate cell cultures; deep sequencing the collected DVG candidates; and selecting a subset of DVGs from the plurality of DVG candidates.

[0009] In some embodiments the method further comprises providing a third set of at least three replicate in vitro cell cultures, comprising a solid support and cells infected with a reference infectious virus at a high multiplicity of infection (MOI); and/or providing a fourth set of at least three replicate in vitro cell cultures, comprising a solid support and cells infected with the reference infectious virus at a low multiplicity of infection (MOI); and culturing the third and/or fourth sets of replicate in vitro cell cultures for at least 5 passages under mutagenic conditions ; or using a reference infectious virus with a mutator phenotype to perform said passages.

[0010] In some embodiments selecting a DVG from the plurality of DVG candidates comprises: comparing the sequences of the DVG candidates with the sequence of the genome of the reference infectious virus; identifying at least one DVG candidate having a genome comprising at least one splicing event where the splicing event is a deletion or a rearrangement; determining the relative frequency of at least one DVG candidate having a genome with at least one splicing event among the population of sequenced DVG candidate genomes; and, selecting at least one DVG for which: a) at least one splicing event is more abundant at high MOI cultures than at low MOI cultures; and/or b) at least one splicing event appears in at least 2, 3, 4, 5, 6, 7, 8 or 9 different cell lines; and/or, c) at least one splicing event is found in at least 3 of at least 12, 24 or 36 independent replicates, after at least 5, 10, 15 or 20 passages; and/or, d) at least one splicing event is a deletion event and the nucleotide size of the deletion is at least 40, 42, 50, 100, 150, 200, 400, 600 or 1000 nucleotides; and/or, e) an open reading frame in the DVG is maintained; and/or, f) the structural domains and functions necessary for viral replication, are maintained in the DVG; and/or g) the DVG comprises at least one mutation that reduces the self-replicative capacity of the reference infectious virus.

[0011] In some embodiments the DVG is characterized by an in vitro inhibitory activity of at least 50%, 60%, 70%, 80% or 90% against the reference infectious virus. In some embodiments the reference infectious virus is a chikungunya virus (CHIKV), Zika virus (ZIKV), enterovirus 71 (EV71), rhinovirus (RV), yellow fever virus (YFV) or West Nile virus (WNV). In some embodiments the reference infectious virus is selected from the group consisting of: CHIKV Indian Ocean lineage (GenBank accession no. AM258994), CHIKV Caribbean strain (GenBank accession no. LN898104.1), ZIKV African strain MR766 (KY989511.1), EV71 Sep006 (GenBank: KX197462.1), RV-A01a (NC_038311.1), RV-A16 (L24917.1), RV-B14 (L05355.1), RV-C15 (GU219984.1), West Nile virus Israel 1998 and YFV strain, Yellow Fever Virus Asibi (YF-Asibi) strain and Yellow Fever Virus vaccine (YF-17D) strain. In some embodiments the reference infectious virus is SARS-CoV-2 (Zhu N et al., N Engl J Med., 2020 Jan 24). In some embodiments the cells are a mammalian cell line selected from the group consisting of: a cell line derived from African green monkey kidney cells (optionally Vero, optionally Vero-E6 cell line), a cell line derived from human muscle (optionally RD cell line), a cell line derived from baby hamster kidneys (optionally BHK cell line), a cell line derived from human embryonic kidney cells (optionally HEK293T cell line) a cell line derived from liver carcinoma cells (optionally Huh7 cell line), and a cell line derived from cervical adenocarcinoma (optionally H1-HeLa, optionally HeLa-E8 cell line). In some embodiments the cells are mosquito a cell line selected from the group consisting of: a cell line derived from Aedes aegypti (optionally Aag2 cell line), a cell derived from Aedes albopictus (optionally C6/36 cell line) and a cell line derived from Aedes albopictus (optionally U4.4 cell line). In some embodiments the low MOI for infection is from 0.001 to 0.1 PFU/cell, in particular from 0.01 to 0.1 PFU/cell. In some embodiments the high MOI for infection is from 1 to 100 PFU/cell.

[0012] Also provided is a DVG produced by the method of this invention.

[0013] Also provided is a DVG comprising or consisting of a nucleotide sequence selected from the group consisting of: SEQ ID NO: 1 (DG1 : EV71 DVG 293-390), SEQ ID NO: 2 (DG2 : EV71 DVG 294-404), SEQ ID NO: 3 (DG3 : EV71 DVG 1746-2895), SEQ ID NO: 4 (DG4 : EV71 DVG 1752-2894), SEQ ID NO: 5 (DG5 : EV71 DVG 1752-2896), SEQ ID NO: 6 (DG6 : EV71 DVG 1880-6487), SEQ ID NO: 7 (DG7 : EV71 DVG 1880-6488), SEQ ID NO: 8 (DG8 : EV71 DVG 3513-6516), SEQ ID NO: 9 (DG9 : EV71 DVG 5475-5634), SEQ ID NO: 10 (DG10: EV71 DVG 5610-6876), SEQ ID NO: 11 (DG11 : EV71 DVG 5610-6877), SEQ ID NO: 12 (DG12: EV71 DVG 5746-5821), SEQ ID NO: 13 (DG13 : EV71 DVG 6322-6356), SEQ ID NO: 14 (DG14: EV71 DVG 6322-6358), SEQ ID NO: 15 (DG15: EV71 DVG 6728-6779), SEQ ID NO: 16 (DG16: EV71 DVG 6966-7012), SEQ ID NO: 17 (DG17: EV71 DVG 6966-7014), SEQ ID NO: 18 (DG18: EV71 DVG 7098-7122), SEQ ID NO: 19 (DG19: EV71 DVG 7165-7200), SEQ ID NO: 20 (DG20: EV71 DVG 7165-7201), SEQ ID NO: 21 (DG21: EV71 DVG 7238-7292), SEQ ID NO: 22 (ZIKV DVG-A), SEQ ID NO: 23 (ZIKV DVG-B), SEQ ID NO: 24 (ZIKV DVG-C), SEQ ID NO: 25 (ZIKV DVG-D), SEQ ID NO: 26 (ZIKV DVG-E), SEQ ID NO: 27 (ZIKV DVG-F), SEQ ID NO: 28 (ZIKV DVG-G), SEQ ID NO: 29 (ZIKV DVG-H), SEQ ID NO: 30 (ZIKV DVG-I), SEQ ID NO: 31 (ZIKV DVG-J), SEQ ID NO: 32 (ZIKV DVG-K), SEQ ID NO: 33 (ZIKV DVG-L), SEQ ID NO: 34 (CHIKV DVG-IV1), SEQ ID NO: 35 (CHIKV DVG-IV2), SEQ ID NO: 36 (CHIKV DVG-IV3), SEQ ID NO: 37 (CHIKV DVG-IV4), SEQ ID NO: 38 (CHIKV DVG-IH1), SEQ ID NO: 39 (CHIKV DVG-IU1), SEQ ID NO: 40 (CHIKV DVG-CV1), SEQ ID NO: 41 (CHIKV DVG-CV2), SEQ ID NO: 42 (CHIKV DVG-CV3), SEQ ID NO: 43 (CHIKV DVG-CV4), SEQ ID NO: 44 (CHIKV DVG-CH1), SEQ ID NO: 45 (CHIKV DVG-CH2), SEQ ID NO: 46 (CHIKV DVG-CH3), SEQ ID NO: 47 (CHIKV DVG-CM1), SEQ ID NO: 48 (CHIKV DVG-CU1), SEQ ID NO: 49 (CHIKV DVG-CU2), SEQ ID NO: 50 (CHIKV DVG-CA1), SEQ ID NO: 51 (CHIKV DVG-CA2), SEQ ID NO: 52 (CHIKV DVG-CA3), SEQ ID NO: 53 (CHIKV DVG-CA4), SEQ ID NO: 55 (RV DVG A01a-TIP-01), SEQ ID NO: 56 (RV DVG A01a-TIP-02), SEQ ID NO: 57 (RV DVG A01a-TIP-03), SEQ ID NO: 58 (RV DVG A01a-TIP-04), SEQ ID NO: 59 (RV DVG A01a-TIP-05), SEQ ID NO: 60 (RV DVG A01a-TIP-06), SEQ ID NO: 62 (RV DVG A16-TIP-01), SEQ ID NO: 63 (RV DVG A16-TIP-02), SEQ ID NO: 64 (RV DVG A16-TIP-03), SEQ ID NO: 65 (RV DVG A16-TIP-04), SEQ ID NO: 66 (RV DVG A16-TIP-05), SEQ ID NO: 89 (RV DVG C15-TIP-01), SEQ ID NO: 90 (RV DVG C15-TIP-02), SEQ ID NO: 91 (RV DVG C15-TIP-03), SEQ ID NO: 92 (RV DVG C15-TIP-04), SEQ ID NO: 68 (RV DVG B14-TIP-01), SEQ ID NO: 69 (RV DVG B14-TIP-02), SEQ ID NO: 70 (RV DVG B14-TIP-03), SEQ ID NO: 71 (RV DVG B14-TIP-04), SEQ ID NO: 72 (RV DVG B14-TIP-05), SEQ ID NO: 73 (RV DVG B14-TIP-06), SEQ ID NO: 74 (RV DVG B14-TIP-07), SEQ ID NO: 75 (RV DVG B14-TIP-08), SEQ ID NO: 76 (RV DVG B14-TIP-09), SEQ ID NO: 77 (RV DVG B14-TIP-10), SEQ ID NO: 78 (RV DVG B14-TIP-11), SEQ ID NO: 79 (RV DVG B14-TIP-12), SEQ ID NO: 80 (RV DVG B14-TIP-13), SEQ ID NO: 81 (RV DVG B14-TIP-14), SEQ ID NO: 82 (RV DVG B14-TIP-15), SEQ ID NO: 83 (RV DVG B14-TIP-16), SEQ ID NO: 84 (RV DVG B14-TIP-17), SEQ ID NO: 85 (RV DVG B14-TIP-18), SEQ ID NO: 86 (RV DVG B14-TIP-19), SEQ ID NO: 87 (RV DVG B14-TIP-20), SEQ ID NO:93 (YFV DVG-A), SEQ ID NO: 94 (YFV DVG-B), SEQ ID NO: 95 (YFV DVG-C), SEQ ID NO: 96 (YFV DVG-D), SEQ ID NO: 97 (YFV DVG-E), SEQ ID NO: 98 (YFV DVG-F), SEQ ID NO: 99 (YFV DVG-G), SEQ ID NO: 100 (YFV DVG-H), SEQ ID NO: 101 (YFV DVG-I), SEQ ID NO: 102 (YFV DVG-J), SEQ ID NO: 103 (YFV DVG-K), SEQ ID NO: 104 (YFV DVG-L), SEQ ID NO:105 (WNV DVG-1), SEQ ID NO: 106 (WNV DVG-2), SEQ ID NO: 107 (WNV DVG-3), SEQ ID NO: 108 (WNV DVG-4), SEQ ID NO: 109 (WNV DVG-5), SEQ ID NO: 110 (WNV DVG-6), SEQ ID NO: 111 (SARS-CoV-2 DVG_1), SEQ ID NO: 112 (SARS-CoV-2 DVG_2) and SEQ ID NO: 113 (SARS-CoV-2 DVG_3), or having at least 70% identity, more preferably at least 80% identity ; more preferably at least 90% identity, more preferably at least 91% identity, more preferably at least 92% identity, more preferably at least 93% identity, more preferably at least 94% identity, more preferably at least 95% identity, more preferably at least 96% identity, more preferably at least 97% identity, more preferably at least 98% identity, or more preferably at least 99% identity with one of these sequences.

[0014] Also provided is a defective interfering particle comprising a DVG of this invention.

[0015] Also provided are methods of treating a viral infection in a subject, comprising administering an efficient therapeutic amount of at least one DVG or defective interfering particle according to this invention.

[0016] In some embodiments the DVG is administered as RNA, naked RNA or RNA formulated with appropriate carriers such as nanoparticles or lipids.

[0017] In some embodiments the DVG is administered as a packaged RNA, as a virus-like particle (VLP) or other packaging carrier.

[0018] In some embodiments the DVG is transcribed from a DNA under the control of a host-appropriate transcriptional promoter.

[0019] In some embodiments the at least one DVG is a defective interfering CHIKV genome. In some embodiments the at least one defective interfering CHIKV genome comprises or consists of a nucleotide sequence selected from the group consisting of: SEQ ID NO: 34 (CHIKV DVG-IV1), SEQ ID NO: 35 (CHIKV DVG-IV2), SEQ ID NO: 36 (CHIKV DVG-IV3), SEQ ID NO: 37 (CHIKV DVG-IV4), SEQ ID NO: 38 (CHIKV DVG-IH1), SEQ ID NO: 39 (CHIKV DVG-IU1), SEQ ID NO: 40 (CHIKV DVG-CV1), SEQ ID NO: 41 (CHIKV DVG-CV2), SEQ ID NO: 42 (CHIKV DVG-CV3), SEQ ID NO: 43 (CHIKV DVG-CV4), SEQ ID NO: 44 (CHIKV DVG-CH1), SEQ ID NO: 45 (CHIKV DVG-CH2), SEQ ID NO: 46 (CHIKV DVG-CH3), SEQ ID NO: 47 (CHIKV DVG-CM1), SEQ ID NO: 48 (CHIKV DVG-CU1), SEQ ID NO: 49 (CHIKV DVG-CU2), SEQ ID NO: 50 (CHIKV DVG-CA1), SEQ ID NO: 51 (CHIKV DVG-CA2), SEQ ID NO: 52 (CHIKV DVG-CA3) and SEQ ID NO: 53 (CHIKV DVG-CA4), or having at least 70% identity, more preferably at least 80% identity ; more preferably at least 90% identity, more preferably at least 91% identity, more preferably at least 92% identity, more preferably at least 93% identity, more preferably at least 94% identity, more preferably at least 95% identity, more preferably at least 96% identity, more preferably at least 97% identity, more preferably at least 98% identity, or more preferably at least 99% identity with one of these sequences.

[0020] In some embodiments the at least one defective interfering genome is a defective interfering ZIKV genome. In some embodiments the at least one interfering ZIKV genome comprises or consists of a nucleotide sequence selected from the group consisting of: SEQ ID NO: 22 (ZIKV DVG-A), SEQ ID NO: 23 (ZIKV DVG-B), SEQ ID NO: 24 (ZIKV DVG-C), SEQ ID NO: 25 (ZIKV DVG-D), SEQ ID NO: 26 (ZIKV DVG-E), SEQ ID NO: 27 (ZIKV DVG-F), SEQ ID NO: 28 (ZIKV DVG-G), SEQ ID NO: 29 (ZIKV DVG-H), SEQ ID NO: 30 (ZIKV DVG-I), SEQ ID NO: 31 (ZIKV DVG-J), SEQ ID NO: 32 (ZIKV DVG-K) and SEQ ID NO: 33 (ZIKV DVG-L), or having at least 70% identity, more preferably at least 80% identity ; more preferably at least 90% identity, more preferably at least 91% identity, more preferably at least 92% identity, more preferably at least 93% identity, more preferably at least 94% identity, more preferably at least 95% identity, more preferably at least 96% identity, more preferably at least 97% identity, more preferably at least 98% identity, or more preferably at least 99% identity with one of these sequences.

[0021] In some embodiments the at least one defective interfering genome is a defective interfering EV71 genome. In some embodiments the at least one defective interfering EV71 genome comprises or consists of a nucleotide sequence selected from the group consisting of: SEQ ID NO: 1 (DG1 : EV71 DVG 293-390), SEQ ID NO: 2 (DG2 : EV71 DVG 294-404), SEQ ID NO: 3 (DG3 : EV71 DVG 1746-2895), SEQ ID NO: 4 (DG4 : EV71 DVG 1752-2894), SEQ ID NO: 5 (DG5 : EV71 DVG 1752-2896), SEQ ID NO: 6 (DG6 : EV71 DVG 1880-6487), SEQ ID NO: 7 (DG7 : EV71 DVG 1880-6488), SEQ ID NO: 8 (DG8 : EV71 DVG 3513-6516), SEQ ID NO: 9 (DG9 : EV71 DVG 5475-5634), SEQ ID NO: 10 (DG10: EV71 DVG 5610-6876), SEQ ID NO: 11 (DG11 : EV71 DVG 5610-6877), SEQ ID NO: 12 (DG12: EV71 DVG 5746-5821), SEQ ID NO: 13 (DG13 : EV71 DVG 6322-6356), SEQ ID NO: 14 (DG14: EV71 DVG 6322-6358), SEQ ID NO: 15 (DG15: EV71 DVG 6728-6779), SEQ ID NO: 16 (DG16: EV71 DVG 6966-7012), SEQ ID NO: 17 (DG17: EV71 DVG 6966-7014), SEQ ID NO: 18 (DG18: EV71 DVG 7098-7122), SEQ ID NO: 19 (DG19: EV71 DVG 7165-7200), SEQ ID NO: 20 (DG20: EV71 DVG 7165-7201) and SEQ ID NO: 21 (DG21: EV71 DVG 7238-7292), or having at least 70% identity, more preferably at least 80% identity ; more preferably at least 90% identity, more preferably at least 91% identity, more preferably at least 92% identity, more preferably at least 93% identity, more preferably at least 94% identity, more preferably at least 95% identity, more preferably at least 96% identity, more preferably at least 97% identity, more preferably at least 98% identity, or more preferably at least 99% identity with one of these sequences.

[0022] In some embodiments the at least one defective interfering genome is a defective interfering RV genome. In some embodiments the at least one defective interfering RV genome comprises or consists of a nucleotide sequence selected from the group consisting of: SEQ ID NO: 55 (RV DVG A01a-TIP-01), SEQ ID NO: 56 (RV DVG A01a-TIP-02), SEQ ID NO: 57 (RV DVG A01a-TIP-03), SEQ ID NO: 58 (RV DVG A01a-TIP-04), SEQ ID NO: 59 (RV DVG A01a-TIP-05), SEQ ID NO: 60 (RV DVG A01a-TIP-06), SEQ ID NO: 62 (RV DVG A16-TIP-01), SEQ ID NO: 63 (RV DVG A16-TIP-02), SEQ ID NO: 64 (RV DVG A16-TIP-03), SEQ ID NO: 65 (RV DVG A16-TIP-04), SEQ ID NO: 66 (RV DVG A16-TIP-05), SEQ ID NO: 89 (RV DVG C15-TIP-01), SEQ ID NO: 90 (RV DVG C15-TIP-02), SEQ ID NO: 91 (RV DVG C15-TIP-03), SEQ ID NO: 92 (RV DVG C15-TIP-04), SEQ ID NO: 68 (RV DVG B14-TIP-01), SEQ ID NO: 69 (RV DVG B14-TIP-02), SEQ ID NO: 70 (RV DVG B14-TIP-03), SEQ ID NO: 71 (RV DVG B14-TIP-04), SEQ ID NO: 72 (RV DVG B14-TIP-05), SEQ ID NO: 73 (RV DVG B14-TIP-06), SEQ ID NO: 74 (RV DVG B14-TIP-07), SEQ ID NO: 75 (RV DVG B14-TIP-08), SEQ ID NO: 76 (RV DVG B14-TIP-09), SEQ ID NO: 77 (RV DVG B14-TIP-10), SEQ ID NO: 78 (RV DVG B14-TIP-11), SEQ ID NO: 79 (RV DVG B14-TIP-12), SEQ ID NO: 80 (RV DVG B14-TIP-13), SEQ ID NO: 81 (RV DVG B14-TIP-14), SEQ ID NO: 82 (RV DVG B14-TIP-15), SEQ ID NO: 83 (RV DVG B14-TIP-16), SEQ ID NO: 84 (RV DVG B14-TIP-17), SEQ ID NO: 85 (RV DVG B14-TIP-18), SEQ ID NO: 86 (RV DVG B14-TIP-19) and SEQ ID NO: 87 (RV DVG B14-TIP-20), or having at least 70% identity, more preferably at least 80% identity ; more preferably at least 90% identity, more preferably at least 91% identity, more preferably at least 92% identity, more preferably at least 93% identity, more preferably at least 94% identity, more preferably at least 95% identity, more preferably at least 96% identity, more preferably at least 97% identity, more preferably at least 98% identity, or more preferably at least 99% identity with one of these sequences.

[0023] In some embodiments the at least one defective interfering genome is a defective interfering YFV genome. In some embodiments the at least one defective interfering YFV genome comprises or consists of a nucleotide sequence selected from the group consisting of: SEQ ID NO:93 (YFV DVG-A), SEQ ID NO: 94 (YFV DVG-B), SEQ ID NO: 95 (YFV DVG-C), SEQ ID NO: 96 (YFV DVG-D), SEQ ID NO: 97 (YFV DVG-E), SEQ ID NO: 98 (YFV DVG-F), SEQ ID NO: 99 (YFV DVG-G), SEQ ID NO: 100 (YFV DVG-H), SEQ ID NO: 101 (YFV DVG-I), SEQ ID NO: 102 (YFV DVG-J), SEQ ID NO: 103 (YFV DVG-K) and SEQ ID NO: 104 (YFV DVG-L), or having at least 70% identity, more preferably at least 80% identity ; more preferably at least 90% identity, more preferably at least 91% identity, more preferably at least 92% identity, more preferably at least 93% identity, more preferably at least 94% identity, more preferably at least 95% identity, more preferably at least 96% identity, more preferably at least 97% identity, more preferably at least 98% identity, or more preferably at least 99% identity with one of these sequences.

[0024] In some embodiments the at least one defective interfering genome is a defective interfering WNV genome. In some embodiments the at least one defective interfering WNV genome comprises or consists of a nucleotide sequence selected from the group consisting of: SEQ ID NO:105 (WNV DVG-1), SEQ ID NO: 106 (WNV DVG-2), SEQ ID NO: 107 (WNV DVG-3), SEQ ID NO: 108 (WNV DVG-4), SEQ ID NO: 109 (WNV DVG-5) and SEQ ID NO: 110 (WNV DVG-6), or having at least 70% identity, more preferably at least 80% identity ; more preferably at least 90% identity, more preferably at least 91% identity, more preferably at least 92% identity, more preferably at least 93% identity, more preferably at least 94% identity, more preferably at least 95% identity, more preferably at least 96% identity, more preferably at least 97% identity, more preferably at least 98% identity, or more preferably at least 99% identity with one of these sequences.

[0025] In some embodiments the at least one defective interfering genome is a defective interfering CV genome, for example a defective interfering SARS-CoV-2 genome. In some embodiments the at least one defective interfering SARS-CoV-2 genome comprises or consists of a nucleotide sequence selected from the group consisting of: SEQ ID NO: 111 (SARS-CoV-2 DVG_1), SEQ ID NO: 112 (SARS-CoV-2 DVG_2) and SEQ ID NO: 113 (SARS-CoV-2 DVG_3), or having at least 70% identity, more preferably at least 80% identity ; more preferably at least 90% identity, more preferably at least 91% identity, more preferably at least 92% identity, more preferably at least 93% identity, more preferably at least 94% identity, more preferably at least 95% identity, more preferably at least 96% identity, more preferably at least 97% identity, more preferably at least 98% identity, or more preferably at least 99% identity with one of these sequences.

[0026] Also provided is a defective interfering genome DVG or defective interfering particle of the invention for use in a method of treatment of CHIKV infection to a subject, wherein the defective interfering genome comprises or consists of a nucleotide sequence selected from the group consisting of: SEQ ID NO: 34 (CHIKV DVG-IV1), SEQ ID NO: 35 (CHIKV DVG-IV2), SEQ ID NO: 36 (CHIKV DVG-IV3), SEQ ID NO: 37 (CHIKV DVG-IV4), SEQ ID NO: 38 (CHIKV DVG-IH1), SEQ ID NO: 39 (CHIKV DVG-IU1), SEQ ID NO: 40 (CHIKV DVG-CV1), SEQ ID NO: 41 (CHIKV DVG-CV2), SEQ ID NO: 42 (CHIKV DVG-CV3), SEQ ID NO: 43 (CHIKV DVG-CV4), SEQ ID NO: 44 (CHIKV DVG-CH1), SEQ ID NO: 45 (CHIKV DVG-CH2), SEQ ID NO: 46 (CHIKV DVG-CH3), SEQ ID NO: 47 (CHIKV DVG-CM1), SEQ ID NO: 48 (CHIKV DVG-CU1), SEQ ID NO: 49 (CHIKV DVG-CU2), SEQ ID NO: 50 (CHIKV DVG-CA1), SEQ ID NO: 51 (CHIKV DVG-CA2), SEQ ID NO: 52 (CHIKV DVG-CA3) and SEQ ID NO: 53 (CHIKV DVG-CA4), or having at least 70% identity, more preferably at least 80% identity ; more preferably at least 90% identity, more preferably at least 91% identity, more preferably at least 92% identity, more preferably at least 93% identity, more preferably at least 94% identity, more preferably at least 95% identity, more preferably at least 96% identity, more preferably at least 97% identity, more preferably at least 98% identity, or more preferably at least 99% identity with one of these sequences.

[0027] Also provided is a defective interfering genome DVG or defective interfering particle of the invention for use in a method of treatment of ZIKV infection to a subject, wherein the defective interfering genome comprises or consists of a nucleotide sequence selected from the group consisting of: SEQ ID NO: 22 (ZIKV DVG-A), SEQ ID NO: 23 (ZIKV DVG-B), SEQ ID NO: 24 (ZIKV DVG-C), SEQ ID NO: 25 (ZIKV DVG-D), SEQ ID NO: 26 (ZIKV DVG-E), SEQ ID NO: 27 (ZIKV DVG-F), SEQ ID NO: 28 (ZIKV DVG-G), SEQ ID NO: 29 (ZIKV DVG-H), SEQ ID NO: 30 (ZIKV DVG-I), SEQ ID NO: 31 (ZIKV DVG-J), SEQ ID NO: 32 (ZIKV DVG-K) and SEQ ID NO: 33 (ZIKV DVG-L), or having at least 70% identity, more preferably at least 80% identity ; more preferably at least 90% identity, more preferably at least 91% identity, more preferably at least 92% identity, more preferably at least 93% identity, more preferably at least 94% identity, more preferably at least 95% identity, more preferably at least 96% identity, more preferably at least 97% identity, more preferably at least 98% identity, or more preferably at least 99% identity with one of these sequences.

[0028] Also provided is a defective interfering genome DVG or defective interfering particle of the invention for use in a method of treatment of EV71 infection to a subject, wherein the defective interfering genome comprises or consists of a nucleotide sequence selected from the group consisting of: SEQ ID NO: 1 (DG1 : EV71 DVG 293-390), SEQ ID NO: 2 (DG2 : EV71 DVG 294-404), SEQ ID NO: 3 (DG3 : EV71 DVG 1746-2895), SEQ ID NO: 4 (DG4 : EV71 DVG 1752-2894), SEQ ID NO: 5 (DG5 : EV71 DVG 1752-2896), SEQ ID NO: 6 (DG6 : EV71 DVG 1880-6487), SEQ ID NO: 7 (DG7 : EV71 DVG 1880-6488), SEQ ID NO: 8 (DG8 : EV71 DVG 3513-6516), SEQ ID NO: 9 (DG9 : EV71 DVG 5475-5634), SEQ ID NO: 10 (DG10: EV71 DVG 5610-6876), SEQ ID NO: 11 (DG11 : EV71 DVG 5610-6877), SEQ ID NO: 12 (DG12: EV71 DVG 5746-5821), SEQ ID NO: 13 (DG13 : EV71 DVG 6322-6356), SEQ ID NO: 14 (DG14: EV71 DVG 6322-6358), SEQ ID NO: 15 (DG15: EV71 DVG 6728-6779), SEQ ID NO: 16 (DG16: EV71 DVG 6966-7012), SEQ ID NO: 17 (DG17: EV71 DVG 6966-7014), SEQ ID NO: 18 (DG18: EV71 DVG 7098-7122), SEQ ID NO: 19 (DG19: EV71 DVG 7165-7200), SEQ ID NO: 20 (DG20: EV71 DVG 7165-7201) and SEQ ID NO: 21 (DG21: EV71 DVG 7238-7292), or having at least 70% identity, more preferably at least 80% identity ; more preferably at least 90% identity, more preferably at least 91% identity, more preferably at least 92% identity, more preferably at least 93% identity, more preferably at least 94% identity, more preferably at least 95% identity, more preferably at least 96% identity, more preferably at least 97% identity, more preferably at least 98% identity, or more preferably at least 99% identity with one of these sequences.

[0029] Also provided is a defective interfering genome DVG or defective interfering particle of the invention for use in a method of treatment of RV infection to a subject, wherein the defective interfering genome comprises or consists of a nucleotide sequence selected from the group consisting of: SEQ ID NO: 55 (RV DVG A01a-TIP-01), SEQ ID NO: 56 (RV DVG A01a-TIP-02), SEQ ID NO: 57 (RV DVG A01a-TIP-03), SEQ ID NO: 58 (RV DVG A01a-TIP-04), SEQ ID NO: 59 (RV DVG A01a-TIP-05), SEQ ID NO: 60 (RV DVG A01a-TIP-06), SEQ ID NO: 62 (RV DVG A16-TIP-01), SEQ ID NO: 63 (RV DVG A16-TIP-02), SEQ ID NO: 64 (RV DVG A16-TIP-03), SEQ ID NO: 65 (RV DVG A16-TIP-04), SEQ ID NO: 66 (RV DVG A16-TIP-05), SEQ ID NO: 89 (RV DVG C15-TIP-01), SEQ ID NO: 90 (RV DVG C15-TIP-02), SEQ ID NO: 91 (RV DVG C15-TIP-03), SEQ ID NO: 92 (RV DVG C15-TIP-04), SEQ ID NO: 68 (RV DVG B14-TIP-01), SEQ ID NO: 69 (RV DVG B14-TIP-02), SEQ ID NO: 70 (RV DVG B14-TIP-03), SEQ ID NO: 71 (RV DVG B14-TIP-04), SEQ ID NO: 72 (RV DVG B14-TIP-05), SEQ ID NO: 73 (RV DVG B14-TIP-06), SEQ ID NO: 74 (RV DVG B14-TIP-07), SEQ ID NO: 75 (RV DVG B14-TIP-08), SEQ ID NO: 76 (RV DVG B14-TIP-09), SEQ ID NO: 77 (RV DVG B14-TIP-10), SEQ ID NO: 78 (RV DVG B14-TIP-11), SEQ ID NO: 79 (RV DVG B14-TIP-12), SEQ ID NO: 80 (RV DVG B14-TIP-13), SEQ ID NO: 81 (RV DVG B14-TIP-14), SEQ ID NO: 82 (RV DVG B14-TIP-15), SEQ ID NO: 83 (RV DVG B14-TIP-16), SEQ ID NO: 84 (RV DVG B14-TIP-17), SEQ ID NO: 85 (RV DVG B14-TIP-18), SEQ ID NO: 86 (RV DVG B14-TIP-19) and SEQ ID NO: 87 (RV DVG B14-TIP-20), or having at least 70% identity, more preferably at least 80% identity ; more preferably at least 90% identity, more preferably at least 91% identity, more preferably at least 92% identity, more preferably at least 93% identity, more preferably at least 94% identity, more preferably at least 95% identity, more preferably at least 96% identity, more preferably at least 97% identity, more preferably at least 98% identity, or more preferably at least 99% identity with one of these sequences.

[0030] Also provided is a defective interfering genome DVG or defective interfering particle of the invention for use in a method of treatment of YFV infection to a subject, wherein the defective interfering genome comprises or consists of a nucleotide sequence selected from the group consisting of: SEQ ID NO:93 (YFV DVG-A), SEQ ID NO: 94 (YFV DVG-B), SEQ ID NO: 95 (YFV DVG-C), SEQ ID NO: 96 (YFV DVG-D), SEQ ID NO: 97 (YFV DVG-E), SEQ ID NO: 98 (YFV DVG-F), SEQ ID NO: 99 (YFV DVG-G), SEQ ID NO: 100 (YFV DVG-H), SEQ ID NO: 101 (YFV DVG-I), SEQ ID NO: 102 (YFV DVG-J), SEQ ID NO: 103 (YFV DVG-K) and SEQ ID NO: 104 (YFV DVG-L), or having at least 70% identity, more preferably at least 80% identity ; more preferably at least 90% identity, more preferably at least 91% identity, more preferably at least 92% identity, more preferably at least 93% identity, more preferably at least 94% identity, more preferably at least 95% identity, more preferably at least 96% identity, more preferably at least 97% identity, more preferably at least 98% identity, or more preferably at least 99% identity with one of these sequences.

[0031] Also provided is a defective interfering genome DVG or defective interfering particle of the invention for use in a method of treatment of WNV infection to a subject, wherein the defective interfering genome comprises or consists of a nucleotide sequence selected from the group consisting of: SEQ ID NO:105 (WNV DVG-1), SEQ ID NO: 106 (WNV DVG-2), SEQ ID NO: 107 (WNV DVG-3), SEQ ID NO: 108 (WNV DVG-4), SEQ ID NO: 109 (WNV DVG-5) and SEQ ID NO: 110 (WNV DVG-6), or having at least 70% identity, more preferably at least 80% identity ; more preferably at least 90% identity, more preferably at least 91% identity, more preferably at least 92% identity, more preferably at least 93% identity, more preferably at least 94% identity, more preferably at least 95% identity, more preferably at least 96% identity, more preferably at least 97% identity, more preferably at least 98% identity, or more preferably at least 99% identity with one of these sequences.

[0032] Also provided is a defective interfering genome DVG or defective interfering particle of the invention for use in a method of treatment of a CV infection to a subject, wherein the CV infection is caused by SARS-CoV-2, and wherein the defective interfering genome comprises or consists of a nucleotide sequence selected from the group consisting of: SEQ ID NO: 111 (SARS-CoV-2 DVG_1), SEQ ID NO: 112 (SARS-CoV-2 DVG_2) and SEQ ID NO: 113 (SARS-CoV-2 DVG_3), or having at least 70% identity, more preferably at least 80% identity ; more preferably at least 90% identity, more preferably at least 91% identity, more preferably at least 92% identity, more preferably at least 93% identity, more preferably at least 94% identity, more preferably at least 95% identity, more preferably at least 96% identity, more preferably at least 97% identity, more preferably at least 98% identity, or more preferably at least 99% identity with one of these sequences.

[0033] Also provided is a pharmaceutical, immunogenic, or therapeutic composition, comprising at least one DVG according to the invention, and a pharmaceutically acceptable carrier.

[0034] Also provided is a pharmaceutical, immunogenic, or therapeutic composition, comprising at least one defective interfering particle according to the invention, and a pharmaceutically acceptable carrier.

[0035] Also provided is a vaccine comprising an immunogenic composition of the invention.

[0036] Also provided is the use of a DVG of the invention, or a defective interfering particle of the invention, for the preparation of a drug for the treatment of a patient infected with a target virus of the DVG or defective interfering particle.

[0037] Also provided is the use of a DVG of the invention, or a defective interfering particle of the invention, for the preparation of a drug for the treatment of a patient infected with CHIKV.

[0038] Also provided is the use of a DVG of the invention, or a defective interfering particle of the invention, for the preparation of a drug for the treatment of a patient infected with ZIKV.

[0039] Also provided is the use of a DVG of the invention, or a defective interfering particle of the invention, for the preparation of a drug for the treatment of a patient infected with EV71.

[0040] Also provided is the use of a DVG of the invention, or a defective interfering particle of the invention, for the preparation of a drug for the treatment of a patient infected with RV.

[0041] Also provided is the use of a DVG of the invention, or a defective interfering particle of the invention, for the preparation of a drug for the treatment of a patient infected with YFV.

[0042] Also provided is the use of a DVG of the invention, or a defective interfering particle of the invention, for the preparation of a drug for the treatment of a patient infected with WNV.

[0043] Also provided is the use of a DVG of the invention, or a defective interfering particle of the invention, for the preparation of a drug for the treatment of a patient infected with CV, in particular by SARS-CoV-2.

[0044] Also provided is a polynucleotide comprising or consisting of a nucleotide sequence selected from the group consisting of: SEQ ID NO: 1 (DG1 : EV71 DVG 293-390), SEQ ID NO: 2 (DG2 : EV71 DVG 294-404), SEQ ID NO: 3 (DG3 : EV71 DVG 1746-2895), SEQ ID NO: 4 (DG4 : EV71 DVG 1752-2894), SEQ ID NO: 5 (DG5 : EV71 DVG 1752-2896), SEQ ID NO: 6 (DG6 : EV71 DVG 1880-6487), SEQ ID NO: 7 (DG7 : EV71 DVG 1880-6488), SEQ ID NO: 8 (DG8 : EV71 DVG 3513-6516), SEQ ID NO: 9 (DG9 : EV71 DVG 5475-5634), SEQ ID NO: 10 (DG10: EV71 DVG 5610-6876), SEQ ID NO: 11 (DG11 : EV71 DVG 5610-6877), SEQ ID NO: 12 (DG12: EV71 DVG 5746-5821), SEQ ID NO: 13 (DG13 : EV71 DVG 6322-6356), SEQ ID NO: 14 (DG14: EV71 DVG 6322-6358), SEQ ID NO: 15 (DG15: EV71 DVG 6728-6779), SEQ ID NO: 16 (DG16: EV71 DVG 6966-7012), SEQ ID NO: 17 (DG17: EV71 DVG 6966-7014), SEQ ID NO: 18 (DG18: EV71 DVG 7098-7122), SEQ ID NO: 19 (DG19: EV71 DVG 7165-7200), SEQ ID NO: 20 (DG20: EV71 DVG 7165-7201), SEQ ID NO: 21 (DG21: EV71 DVG 7238-7292), SEQ ID NO: 22 (ZIKV DVG-A), SEQ ID NO: 23 (ZIKV DVG-B), SEQ ID NO: 24 (ZIKV DVG-C), SEQ ID NO: 25 (ZIKV DVG-D), SEQ ID NO: 26 (ZIKV DVG-E), SEQ ID NO: 27 (ZIKV DVG-F), SEQ ID NO: 28 (ZIKV DVG-G), SEQ ID NO: 29 (ZIKV DVG-H), SEQ ID NO: 30 (ZIKV DVG-I), SEQ ID NO: 31 (ZIKV DVG-J), SEQ ID NO: 32 (ZIKV DVG-K), SEQ ID NO: 33 (ZIKV DVG-L), SEQ ID NO: 34 (CHIKV DVG-IV1), SEQ ID NO: 35 (CHIKV DVG-IV2), SEQ ID NO: 36 (CHIKV DVG-IV3), SEQ ID NO: 37 (CHIKV DVG-IV4), SEQ ID NO: 38 (CHIKV DVG-IH1), SEQ ID NO: 39 (CHIKV DVG-IU1), SEQ ID NO: 40 (CHIKV DVG-CV1), SEQ ID NO: 41 (CHIKV DVG-CV2), SEQ ID NO: 42 (CHIKV DVG-CV3), SEQ ID NO: 43 (CHIKV DVG-CV4), SEQ ID NO: 44 (CHIKV DVG-CH1), SEQ ID NO: 45 (CHIKV DVG-CH2), SEQ ID NO: 46 (CHIKV DVG-CH3), SEQ ID NO: 47 (CHIKV DVG-CM1), SEQ ID NO: 48 (CHIKV DVG-CU1), SEQ ID NO: 49 (CHIKV DVG-CU2), SEQ ID NO: 50 (CHIKV DVG-CA1), SEQ ID NO: 51 (CHIKV DVG-CA2), SEQ ID NO: 52 (CHIKV DVG-CA3), SEQ ID NO: 53 (CHIKV DVG-CA4), SEQ ID NO: 55 (RV DVG A01a-TIP-01), SEQ ID NO: 56 (RV DVG A01a-TIP-02), SEQ ID NO: 57 (RV DVG A01a-TIP-03), SEQ ID NO: 58 (RV DVG A01a-TIP-04), SEQ ID NO: 59 (RV DVG A01a-TIP-05), SEQ ID NO: 60 (RV DVG A01a-TIP-06), SEQ ID NO: 62 (RV DVG A16-TIP-01), SEQ ID NO: 63 (RV DVG A16-TIP-02), SEQ ID NO: 64 (RV DVG A16-TIP-03), SEQ ID NO: 65 (RV DVG A16-TIP-04), SEQ ID NO: 66 (RV DVG A16-TIP-05), SEQ ID NO: 89 (RV DVG C15-TIP-01), SEQ ID NO: 90 (RV DVG C15-TIP-02), SEQ ID NO: 91 (RV DVG C15-TIP-03), SEQ ID NO: 92 (RV DVG C15-TIP-04), SEQ ID NO: 68 (RV DVG B14-TIP-01), SEQ ID NO: 69 (RV DVG B14-TIP-02), SEQ ID NO: 70 (RV DVG B14-TIP-03), SEQ ID NO: 71 (RV DVG B14-TIP-04), SEQ ID NO: 72 (RV DVG B14-TIP-05), SEQ ID NO: 73 (RV DVG B14-TIP-06), SEQ ID NO: 74 (RV DVG B14-TIP-07), SEQ ID NO: 75 (RV DVG B14-TIP-08), SEQ ID NO: 76 (RV DVG B14-TIP-09), SEQ ID NO: 77 (RV DVG B14-TIP-10), SEQ ID NO: 78 (RV DVG B14-TIP-11), SEQ ID NO: 79 (RV DVG B14-TIP-12), SEQ ID NO: 80 (RV DVG B14-TIP-13), SEQ ID NO: 81 (RV DVG B14-TIP-14), SEQ ID NO: 82 (RV DVG B14-TIP-15), SEQ ID NO: 83 (RV DVG B14-TIP-16), SEQ ID NO: 84 (RV DVG B14-TIP-17), SEQ ID NO: 85 (RV DVG B14-TIP-18), SEQ ID NO: 86 (RV DVG B14-TIP-19), and SEQ ID NO: 87 (RV DVG B14-TIP-20), SEQ ID NO:93 (YFV DVG-A), SEQ ID NO: 94 (YFV DVG-B), SEQ ID NO: 95 (YFV DVG-C), SEQ ID NO: 96 (YFV DVG-D), SEQ ID NO: 97 (YFV DVG-E), SEQ ID NO: 98 (YFV DVG-F), SEQ ID NO: 99 (YFV DVG-G), SEQ ID NO: 100 (YFV DVG-H), SEQ ID NO: 101 (YFV DVG-I), SEQ ID NO: 102 (YFV DVG-J), SEQ ID NO: 103 (YFV DVG-K), SEQ ID NO: 104 (YFV DVG-L), SEQ ID NO:105 (WNV DVG-1), SEQ ID NO: 106 (WNV DVG-2), SEQ ID NO: 107 (WNV DVG-3), SEQ ID NO: 108 (WNV DVG-4), SEQ ID NO: 109 (WNV DVG-5), SEQ ID NO: 110 (WNV DVG-6), SEQ ID NO: 111 (SARS-CoV-2 DVG_1), SEQ ID NO: 112 (SARS-CoV-2 DVG_2) and SEQ ID NO: 113 (SARS-CoV-2 DVG_3), or having at least 70% identity, more preferably at least 80% identity ; more preferably at least 90% identity, more preferably at least 91% identity, more preferably at least 92% identity, more preferably at least 93% identity, more preferably at least 94% identity, more preferably at least 95% identity, more preferably at least 96% identity, more preferably at least 97% identity, more preferably at least 98% identity, or more preferably at least 99% identity with one of these sequences.

[0045] Also provided is an expression vector or a plasmid comprising a polynucleotide of the invention.

[0046] Also provided is a cell line producing a DVG according to the invention.

[0047] The invention will be more fully understood by reference to the following examples, which are non-limiting.

### EXAMPLES

### Example 1: Methods

### Growth of Viruses

[0048] Traditionally, DVGs were observed when virus is passaged at high multiplicity of infection (MOI). Most published work is based on identifying DVGs from few passages and few replicates, resulting in the identification of a single most abundant DVG, generally by methods that biased towards identifying the shortest DVGs with the largest deletions (e.g. by RT-PCR amplification using primers spanning the 5′ and 3′ ends of RNA genomes). This led to the notion that only a few DVG are generated for any given virus. We find that DVGs number is in the hundreds to thousands, in terms of sequence; and that the best candidate DVGs for interference are not necessarily the single most abundant DVG that appears in a single growth condition. In our method, wild-type virus is passaged under both low (control) and high MOI conditions, as well as in mutagenic conditions that we have found to increase the generation of defective genomes. These mutagenic conditions include either mutator variants of viruses that generate more errors than the native wild-type virus, or extrinsic treatments that increase these errors rates (for example, base analogs such as ribavirin, 5-fluorouracil, 5-azacytidine, T705 or other treatments such as increasing temperature or supplementing media with Mn++). Viruses are passaged in high biological replicate numbers (3, 12, 24 or 36) for up to 10 passages. We observed that 5 passages suffice to generate the required data. We also recommend using a variety of cell types or different hosts, since we observe differences in the types of DVGs that are favored between cell lines and hosts.

### Identifying DVG Candidates

[0049] The viruses from the passage series are deep sequenced to characterize every deletion or rearrangement that occurs across the entire genome. The number of reads describing a specific deletion/rearrangement relative to the total number of reads at that position is used as a proxy of the frequency at which that deletion is present in the entire virus population. Hundreds to thousands of different DVGs are found for any given virus using this method. We use computational tools to identify which of these DVGs occur with high frequency and abundance, and which are redundant between replicates, to select the 10-20 best candidates for further testing.

[0050] We use the following criteria and rationale to predict which DVGs would make the best TIP candidates, based on the assumption that a good candidate will have relatively high replication fitness compared to wild-type, will be encapsidated or passaged from cell to cell alongside wild-type, will compete and interfere with wild-type, will retain domains and functions required for propagation, will retain fitness in different cell types and hosts:

[0051] DVGs that occur at higher frequency in a population, are most likely to be viable (able to replicate or be replicated by wild-type virus) and have a higher likelihood of competing with wild-type virus.

[0052] DVGs that occur across a passage series, are most likely to be able to compete with wild-type, and be encapsidated into VLPs, to infect new cells.

[0053] DVGs that occur in more than three biological replicates, are more likely to have a high enough fitness to compete with wild-type, and likely have retained the structural and functional elements required for replication and propagation.

[0054] DVGs that occur in more than one cell type or host, are more likely to be viable in different cell conditions.

[0055] DVGs that occur at higher frequency in high MOI or mutagenic conditions versus low MOI conditions, are more likely to be true competitors with wild-type virus.

[0056] Additionally, we match the nucleotide position of start and stop of the deletion (the breakpoints) with the predicted RNA structure of the genome (See Example 2, FIGS. 8-22). We found that while small deletions occur at random across the entire genome, larger deletions in the DVG candidates that satisfy the criteria above, occur at key structural sites. That is, the predicted RNA structure of a virus can be used to predict where a large deletion will occur, and whether it will result in a viable DVG candidate.

[0057] We observed that DVGs may interfere and operate by more than one mechanism. The classic view is that shorter DVGs steal replication machinery from wild-type and outcompete wild-type because their shorter genomes replicate faster. However, additional mechanisms that we have observed include: DVGs that alter the stoichiometry of viral proteins available to wild-type by providing more of some viral proteins than is normally required; DVGs that generate misfolded proteins that induce cellular responses and danger signals; DVGs that encode faulty proteins that result in non-viable wild-type viruses by ‘poisoning’ wild-type replication and assembly; DVGs that induce innate immunity and other cellular responses because they are more readily sensed as danger signals. Ideal DVGs could present one, some or all of these mechanisms or be composed of a cocktail of DVGs each manifesting some of these mechanisms.

[0058] Using this approach, we have obtained the total DVG profiles (hundreds to thousands) of the following viruses and strains:
[0059] Chikungunya virus, Caribbean and Indian Ocean islands strain;
[0060] Zika virus, African strain;
[0061] Enterovirus A71;
[0062] Rhinovirus A01a, A16, B14, and C15;
[0063] Yellow fever virus 17D vaccine strain and Asibi; and
[0064] West Nile virus.
[0065] Coronavirus, in particular SARS-CoV-2 strain (BetaCoV/ France/IDF0372/2020).

[0066] From these lists, using the selection criteria mentioned above, we identified the top candidates for each type of virus. The top sequences of the top candidates are provided in attached information sequence listing. Once the list of top candidates is established, infectious clones of DVGs are made and tested in vitro, and then in vivo. Our results show that this method of identification and down-selection has a very high success rate, where 50-90% of candidates show inhibitory activity against wild-type virus in vitro.

### EXAMPLES OF THE METHOD

[0067] Examples of the method are shown in FIGS. 1 to 7.

[0068] FIG. 1 shows passaging methods at low/high MOI or mutagenic conditions.

[0069] FIG. 2 shows bioinformatics pipeline to detect deletions.

[0070] FIG. 3 shows heat map example of deletions.

[0071] FIG. 4 shows start/stop example.

[0072] FIG. 5 shows specific deletions in a sample example.

[0073] FIG. 6 shows differences in cell types example.

[0074] FIG. 7 shows mutagenic conditions sample.

### Example 2: Enterovirus A71 (EV71)

### Generation and Characterization of All DVGs Occurring Within EV71

[0075] A 12-well plate was seeded with Vero cells to reach ~90% confluency the next day. The 12 wells were individually transfected with 500 ng pCAGGS-EV71_Sep006 (EV71 Sep006 - GenBank: KX197462.1), using Lipofectamine 2000 (Life Technologies), to generate infectious virus from a stable background. Subsequently Vero cells were infected with 300 µl of the virus supernatant. Or 12-well plates of Vero or RD cells were infected either with a fixed low volume (3 µl) or a high volume (300 µl). Cells were incubated at 37° C., and 5% CO₂ until wells showed >90% CPE. After two freeze-thaw cycles fresh confluent monolayers of cells were infected. This was repeated 12 times using 12 replicates.

[0076] The supernatant was processed by centrifugation (13,000 g for 30 min), followed by either RNaseA treatment (1 µl; Thermo; 3 h at 37° C.) or by PEG-precipitation (10 mM HEPES (Sigma), pH 8.0, 0.8% PEG8000 (Sigma), and 50 mM NaCl (Sigma)), followed by another centrifugation of 13,500 x g for 1 h. The RNA was extracted from the cleared supernatant using Trizol (Sigma).

[0077] Sample RNA was fragmented using the NEBNext RNA First Strand Buffer (NEB) and heat-fragmentation at 94° C. for 15 min. The RNAseq libraries were generated the NEBNext Ultra II Non-Directional RNA Library Prep Kit for Illumina (NEB) according to the manufacturer’s instructions. To allow multiplexing of the samples, NEBNext Multiplex Oligos for Illumina (NEB) were used to generate indexes. The generated libraries were pooled and sequenced on an Illumina NextSeq500 Sequencer using Illumina NextSeq 500/550 Mid Output Reagent Cartridge v2 and Illumina NextSeq 500/550 Mid Output Flow Cell Cartridge v2.5 using 150 cycle single-end reads. The obtained sequences were analyzed using the BBMap suite-based computational pipeline.

[0078] Initially identified DVGs were analyzed by reoccurrence between replicates, passages, and cell lines. This yielded a list of 15 DVGs that were taken forward to be analyzed for interference activity and thus, whether these DVGs could be used as TIPs. Of the 15 identified DVGs, 6 resulted in a deletion that would result in a nonsense mutation after the breakpoint. As a control, the deletion length of these 6 DVGs were adjusted to remain the open reading frame. Thus, the candidate list assessed was 21 DVGs.

[0079] FIG. 8: Serial Passaging of EV71. 12 replicates of either Vero or RD cells were infected with EV71 at fixed volumes of either 3 µl (low) or 300 µl (high). Infections were incubated until cells showed >90% CPE. The virus was serially passaged over 12 passages. Virus titers were measured using TCID50 and the MOI range that could be obtained with these fixed volumes were calculated.

[0080] FIG. 9: Deletion Heatmaps of EV71. The samples from the serial passaging were analyzed by RNAseq and deletions were detected using the BBMap-based pipeline. Subsequently the individual replicates in each cell line, condition, and passage were pooled and visualized to show a heatmap of the frequency of each deleted nucleotide relative to the position in the virus genome. Overall the deletion hotspots were relatively small and often had distinct locations in relation to the genome.

[0081] FIG. 10: Deletion Hotspots in the IRES. Aligning the Deletion hotspots to the virus genome, there is a strong hotspot across passages and cell lines that is located in the 5′ UTR of EV71. Closer analysis shows that this hotspot corresponds to the top of stem-loop IV of the IRES (circled in red), which is required to initiate efficient translation of the RNA to the viral polyprotein.

[0082] FIG. 11: Deletion Hotspots in the Capsid. Many deletion hotspots of EV71 locate to the capsid region of the genome. This region corresponds to the structural proteins of the virus. Examples of a region that was frequently deleted are marked in the box (black) and the schematic of the deletion in relation to the genome shows deletions in the within the main capsid protein VP1, as well as a larger deletion that spans across the majority of VP3 and VP1.

[0083] FIG. 12: Deletion Hotspot in 3C. The 3C protein in EV71 has a dual function, it is the virus’ main protease that cleaves the polyprotein into its individual functional proteins. At the same time the 3C protein is also the main interferon antagonist and thus, the main protein that counteracts the cell’s innate immune response. The protein is 183 amino acids in length, while 3C active side of protein consists of at least six residues (marked in red). Interestingly, the deletion hotspots in 3C seem to overlap with the active side, suggesting that deletions would render the protein nonfunctional.

[0084] FIG. 13: Deletion Hotspot in 3D. The viral polymerase is located in the 3D protein. The deletion heatmap indicates the presence of a number of different small deletions throughout the protein. Interestingly, there are two heat signals towards the 3′-end of the open-reading frame, which appear to be located within two predicted stem-loop structures, which were also identified in poliovirus and were implicated in the sufficient replication of the virus.

[0085] The deletion candidates, as well as other DVGs, were further examined to determine whether the deleted sequences that were observed, correlated with either specific nucleotide signatures or RNA structures.

[0086] FIG. 14: Complementarity of Nucleotides after Breakpoints. To analyze the complementarity of the nucleotides around the breakpoints, the nucleotides were assessed individually and positions 1-6 after the start-breakpoint were tested against positions 1-6 after the end-breakpoint. The graph shows the frequency of complementarity on the y-axis and the nucleotide-threshold for the deletions length, i.e. all deletions of this size and bigger, on the x-axis. Deletions of 41 nucleotides and shorter do not rely on complementarity around the breakpoints, which suggests rather a slipping of the polymerase along the genome as mode of action. The frequency of complementarity increases gradually, indicating that the longer the deletion is the more important is complementarity around the breakpoints. For deletions longer than 79 nucleotides, around 95% have the first nucleotide position and around 88.5% the first three nucleotide positions complementary to each other. A random event would be expected to be around 25%.

[0087] FIG. 15: Complementarity of Nucleotides around breakpoints is conserved across viruses. The importance of complementarity around the breakpoints was analyzed for CHIKV Caribbean strain (CHIKVc), CHIKV IOL (CHIKVi), ZIKV, EV71 and RV-B14 (RV). The y-axis indicates the frequency of complementarity, while the x-axis represents the alignment of nucleotides around the start- and stop- positions respectively. Interestingly, next to a positive signal of complementarity, the deletions coincided with a negative signal of less than 1% at the nucleotide position just prior to the breakpoint. The number of nucleotides that are complementary to each other after the breakpoint, or the primer, varies across the individual viruses. For CHIKV it is about 2 nts, 3-5 nts for ZIKV, 3-4 nts for EV71, and 2 nts for RV.

[0088] FIG. 16: The complementarity map for deletions above 42 nt show that EV71 use the “disassociate and re-prime” mechanism. There is a strong negative signal in the position just before the “primer” sequence, which is almost never identical (ca. 0.5% of the time - around 25% would be random). Then there are various primer lengths, but the average for EV71 appears to be 3 nt.

[0089] FIG. 17: Examples of Complementarity sequences around Breakpoints: Shown are three examples of DVGs that utilize complementary nucleotide sequences around the breakpoint that the polymerase can use to re-attach and re-initiate transcription, resulting in an internal deletion of the sequence between these two complementary genome regions.

[0090] FIG. 18: Complementary Nucleotides around Breakpoints are often located in Loops in RNA Secondary Structure. The whole genome RNA secondary structure of EV71 was modelled using RNA fold (right). Deletions were mapped onto the structure and hotspots often coincided with loop structures in the secondary structure. Together with the complementary sequence around the breakpoint, this would allow these sequences to be unpaired so that the complementary sequence functions as a potential primer to bind and to allow re-initiation of transcription using a prime-realign approach. The polymerase appears to be destabilized at “donor” sides, the replication is interrupted until the polymerase can re-attach at a different location of the genome (“acceptor”) using the complementary primer and continues transcription, resulting in an internal deletion.

[0091] FIG. 19: EV71 DVGs sequences : SEQ ID NO: 1 (DG1 : EV71 DVG 293-390), SEQ ID NO: 2 (DG2 : EV71 DVG 294-404), SEQ ID NO: 3 (DG3 : EV71 DVG 1746-2895), SEQ ID NO: 4 (DG4 : EV71 DVG 1752-2894), SEQ ID NO: 5 (DG5 : EV71 DVG 1752-2896), SEQ ID NO: 6 (DG6 : EV71 DVG 1880-6487), SEQ ID NO: 7 (DG7 : EV71 DVG 1880-6488), SEQ ID NO: 8 (DG8 : EV71 DVG 3513-6516), SEQ ID NO: 9 (DG9 : EV71 DVG 5475-5634), SEQ ID NO: 10 (DG10: EV71 DVG 5610-6876), SEQ ID NO: 11 (DG11 : EV71 DVG 5610-6877), SEQ ID NO: 12 (DG12: EV71 DVG 5746-5821), SEQ ID NO: 13 (DG13 : EV71 DVG 6322-6356), SEQ ID NO: 14 (DG14: EV71 DVG 6322-6358), SEQ ID NO: 15 (DG15: EV71 DVG 6728-6779), SEQ ID NO: 16 (DG16: EV71 DVG 6966-7012), SEQ ID NO: 17 (DG17: EV71 DVG 6966-7014), SEQ ID NO: 18 (DG18: EV71 DVG 7098-7122), SEQ ID NO: 19 (DG19: EV71 DVG 7165-7200), SEQ ID NO: 20 (DG20: EV71 DVG 7165-7201) and SEQ ID NO: 21 (DG21: EV71 DVG 7238-7292).

[0092] The EV71 DGV sequences are listed in the following table.

| SEQ ID NO | Virus | Name | DVG size | Figure |
|---|---|---|---|---|
| 1 | EV71 | 293-390 | 7334 | FIG. 19 |
| 2 | EV71 | 294-404 | 7321 | FIG. 19 |
| 3 | EV71 | 1746-2895 | 6282 | FIG. 19 |
| 4 | EV71 | 1752-2894 | 6289 | FIG. 19 |
| 5 | EV71 | 1752-2896 | 6288 | FIG. 19 |
| 6 | EV71 | 1880-6487 | 6288 | FIG. 19 |
| 7 | EV71 | 1880-6488 | 2823 | FIG. 19 |
| 8 | EV71 | 3513-6516 | 4428 | FIG. 19 |
| 9 | EV71 | 5475-5634 | 7272 | FIG. 19 |
| 10 | EV71 | 5610-6876 | 7165 | FIG. 19 |
| 11 | EV71 | 5610-6877 | 7164 | FIG. 19 |
| 12 | EV71 | 5746-5821 | 7356 | FIG. 19 |
| 13 | EV71 | 6322-6356 | 7397 | FIG. 19 |
| 14 | EV71 | 6322-6358 | 7395 | FIG. 19 |
| 15 | EV71 | 6728-6779 | 7380 | FIG. 19 |
| 16 | EV71 | 6966-7012 | 7385 | FIG. 19 |
| 17 | EV71 | 6966-7014 | 7383 | FIG. 19 |
| 18 | EV71 | 7098-7122 | 7407 | FIG. 19 |
| 19 | EV71 | 7165-7200 | 7396 | FIG. 19 |
| 20 | EV71 | 7165-7201 | 7395 | FIG. 19 |
| 21 | EV71 | 7238-7292 | 7377 | FIG. 19 |

[0093] FIG. 20: EV71 DI candidates co-transfections

[0094] Preferred EV71 DVGs are selected from the group consisting of: SEQ ID NO: 1 (EV71 DVG 293-390,DG1), SEQ ID NO: 3 (EV71 DVG 17646-2895, DG3), SEQ ID NO: 14 (EV71 DVG 6322-6358, DG14), SEQ ID NO: 15 (EV71 DVG 6728-6779, DG15), SEQ ID NO: 18 (EV71 DVG 7098-7122, DG18), and SEQ ID NO: 21 (EV71 DVG 7238-7292, DG21).

### EV71 TIP Candidates Inhibit Wild-Type Virus In Vitro

[0095] 24-wellplates with 293T cells were seeded to reach ~90% confluency the following day. 200 ng of pCAGGS-EV71_Sep006 were transfected either alone, with a control plasmid (pcDNA3-RFP) or the individual DVGs. The other plasmids were mixed with the wild-type EV71 recovery plasmid at the molarity ratios of 1:1, 5:1, or 10:1 (DVG to WT). Transfections were performed in replicates of four. The plasmids were transfected using Lipofectamine 2000 (Life Technologies), media was changed after 6 hours and samples were harvested 4 days post transfection. Virus titers were assessed either by TCID50 or by plaque assay. In brief, for TCID50 96-well plates were seeded with Vero cells and serially diluted virus supernatants, which were freeze-thawed twice, where added and samples were incubated at 37° C., and 5% CO₂ for 7 days. For plaque assays, virus was titrated in 24-well plates using VeroE6 cells that were seeded 24 h prior to infections. After 1 h incubation of the 10-fold serial diluted virus samples, the cells were covered with a semi-solid agarose overlay using 2% FBS (LifeTechnologies), MEM (LifeTechnologies), and 0.05% Agarose (Thermo). The plates were incubated at 37° C., and 5% CO₂ for 72 h. For both methods cells for fixed with 4% Formalin and plaques were visualized using crystal violet.

### Example 3: Zika Virus (ZIKV)

### Generation and Characterization of All DVGs Occurring Within Zika

[0096] Method: The virus used for the identification of DVGs is the African strain MR766 of Zika virus (ZIKV). In order to identify DVGs, ZIKV was passaged at a high multiplicity of infection in Vero, BHK or C6/36 cells. Briefly, cells that were seeded to reach between 70-80% confluence were infected with an initial MOI of 5 PFU/cell. 3 (Vero, BHK) or 5 (C6/36) days post infection, the cell culture supernatant was clarified by centrifugation, and 300 ul of the supernatant used to infect naive cells (passage 2). For low MOI conditions, 3 ul of the viral supernatant was used for infection in the subsequent passage. The passaging was repeated 12 times. RNA was extracted from the cleared supernatant (TRIzol) and used for next-generation sequencing. Libraries prepared using the RNA Library Prep kit (Illumina) were loaded on an Illumina NextSeq500 sequencer, using 150 cycle single-end reads. The reads obtained were analyzed using the computational pipeline described above.

[0097] Deep sequencing of samples and computational analysis identified all deletion hotspots across the genome and specific DVGs occurring within the population. In FIG. 21, each panel represents a different passage number, while each row in each panel is a different biological replicate, performed in BHK cells. Analysis reveals deletion hotspots that are common to several replicates, suggesting these DVGs are of higher fitness than the many others that carry random deletions. Deletions also occur across passages, suggesting that the corresponding DVGs are higher fitness and can be packaged to infect new cells. In FIG. 22, the same analysis was performed for virus passaged in Vero cells. The data reveal that while in initial passages there are some deletions and DVGs that are also found in BHK cells, certain deletion hotspots (in the 5’end of th genome) are unique to this cell line and take over other deletions in terms of frequency. In FIG. 21, the deletion hotspots show deleted regions in 5′ end of the ZIKV genome which is similar to the pattern observed in Vero cells. Altogether, the data show the importance of using more than one cell line or host to determine the total breadth and overall fitness of DVGs in different conditions. A further comparison of the common and unique DVGs found in different cell types is shown in FIG. 24, where Zika grown in Vero (left panel) and C6/36 (right panel) are compared. The figure highlights that there are many differences between cell types, yet also reveals a cluster of deletions in both cell types that emerges as the passage series progresses (suggesting high fitness of these DVGs).

[0098] From these and other analyses, we selected a list of TIP candidates following our criteria for selection. The candidates were named A, B, C, D, E, F, G, H, K and L. The candidates span a variety of sizes and the deletions occur in different places in the genome, representing a wider array of TIP candidates than could be identified using conventional passaging and isolation.

[0099] FIG. 21. DVG identification in BHK-21 cells. ZIKV populations from each passage were deep sequenced (RNAseq) and the normalized frequency of each deleted nucleotide position (x axis) throughout the ZIKV genome is shown as a heat map. Each panel represents a different passage number for all high MOI replicates. Each row within each panel represents each of 12 biological replicates.

[0100] FIG. 22: DVG identification in Vero cells. ZIKV populations from each passage were deep sequenced (RNAseq) and the normalized frequency of each deleted nucleotide position throughout the ZIKV genome is shown as a heat map. Each panel represents a different passage number for all high MOI replicates.

[0101] FIG. 23: DVG identification in C6/36 cells. ZIKV populations from each passage were deep sequenced (RNAseq) and the normalized frequency of each deleted nucleotide position throughout the ZIKV genome is shown as a heat map. Each panel represents a different passage number for all high MOI replicates.

[0102] FIG. 24: Identification of ZIKV DVG hotspots. Start (x axis) and stop (y axis) positions of the deletions were plotted for Vero (A) and C6/36 (B) cell passages. Data points are colored according to passage number. A clear hotspot was observed in the region with start and stop positions at approximately 500-3000 nt start-stop, particularly in Vero cells

[0103] FIG. 25: Schematic representation of candidate ZIKV DVGs. ZIKV candidate DVGs were chosen based on their redundancy and frequency throughout passaging. Each letter on the left represents the provisional name of the DVG.

### Zika TIP Candidate K Is Non-Replicative Per Se

[0104] Method: DG K-based replicon constructs were designed to assess the ability of the DG to replicate. Nanoluc reporter constructs were generated in which the reporter is inserted in place of the structural proteins, as is normally designed for flavivirus replicons (FIG. 29 A). RNA was generated from the DNA clones by in vitro transcription, and transfected into Vero cells. At 6, 24, 48 and 72 h post transfection, nanoluc reporter activity was measured in cells.

[0105] The results show that unlike the WT replicon for which an increase in reporter activity is observed over the time course, the DG K replicon showed no increase (FIG. 29 B). However, when the assay was repeated in infected cells, replicon activity is recovered (FIG. 29 C), suggesting that the DG is non-replicative by itself, but requires WT for its replication. These results have important implications in terms of safety of the use of DVGs as potential TIPs.

[0106] FIG. 27. ZIKV DG is non-replicative per se and depends on WT for its replication. (A) Schematic diagram of replicon constructs. For the wild-type replicon, C₃₈ and E₃₀ represent the N-terminal 38 aminoacids of C and the C- terminal 30 aminoacids E proteins, respectively. For the DG replicon, Pr₃₈ and NS1₉₈ represent the N-terminal 38 aminoacids and the C- terminal 98 aminoacids of Pr and NS1 proteins, respectively. Nanoluc2A represents the nanoluc reporter sequence followed by the foot-and-mouse disease virus 2A protease. An inactive mutant replicon (NS5ΔGDD_{AAA} replicon) was also constructed. (B) Wild-type and DG replicon assays. Equal amounts of wild-type, NS5ΔGDD_{AAA}, and DG replicon RNA were transfected in Vero cells, and relative light units (RLU) measured at the indicated times post-transfection. (C) DG replicon assays in infected or non-infected cells. Equal amounts of DG replicon RNA was transfected in naive or infected Vero cells (MOI 1 PFU/cell), and relative light units (RLU) measured at the indicated times post-transfection. Wildtype and NS5ΔGDD_{AAA} replicons were carried out as controls. All graphs show the mean and SD; n=3 per group for a representative experiment, and the time points within each group were compared to RLU values at 4 h. Two-way ANOVA with Dunnet’s multiple comparison test (^{∗} = p≤ 0.05, ^{∗∗}= p≤ 0.01, ^{∗∗∗}= p≤ 0.001, ^{∗∗∗∗}= p≤ 0.0001) was performed.

### Zika TIP Candidates Inhibit Wild-Type Virus In Vitro

[0107] Method: HEK293T cells were transfected with a plasmid encoding wild-type ZIKV or the candidate DVGs in increasing molar ratios (1:10, 1:1 or 10:1 DVG:WT ratio). 4 days post transfection, virus titer was determined by plaque assay.

[0108] The candidate TIPs identified above were tested in vitro for their ability to inhibit wild-type Zika virus. Cells were transfected with a plasmid coding for Zika virus, along with plasmids coding for each DVG at increasing molar ratios. The effect of the TIP candidate on WT virus growth was determined by measuring the amount of progeny virus after treatment. The data (FIG. 28) show that at highest ratios, all TIP candidates except DG-G or the out-of-frame DG-H had at least a slight inhibitory effect; while DG-C, -D, -E, -F, -K and -L lowered viral titers by 1 log or more. The results also reveal a dose dependence of inhibition.

[0109] FIG. 26: Candidate DVG inhibition of ZIKV replication in vitro. HEK293T cells were transfected with plasmids encoding ZIKV candidate DVGs and wild-type encoding plasmid at increasing molar ratios (1:10, 1:1 or 10:1 DVG:WT). 4 days post-transfection, the cell culture supernatant was harvested and ZIKV titers determined by plaque assay to determine whether the candidate DVGs have an interfering effect. Two-way ANOVA with Dunnet’s multiple comparison test (^{∗} = p≤ 0.05, ^{∗∗}= p≤ 0.01, ^{∗∗∗}= p≤ 0.001, ^{∗∗∗∗}= p≤ 0.0001) was carried out. Each condition was compared to cells transfected only with wild-type virus.

### Zika TIP Candidates Inhibit Wildtype Virus In Vivo

[0110] Method in mice: AG129 male mice (4-6 week old) were infected with 10⁴ PFU of Zika virus and co-transfected with 20 ug plasmid encoding DG-E, —H or -K (candidate DVGs that exhibited the highest inhibition effect in vitro), using the in vivojetPEI transfection reagent (Polyplus), in a total volume of 50 ul via a footpad injection (s.c.). Control mice received a control plasmid not coding for any TIP. The ability of TIPs to attenuate infection was monitored by weight loss. Viremia was also measured daily (except day 5). 7 days post infection, mice were euthanized and spleen, brain and tested dissected for determination of virus titer in these organs.

[0111] The results show (FIG. 28A) that all three TIPs protected mice from weight loss, while those that receiving the control plasmid had significant weight loss by day 7. We monitored the effect of TIP treatment on viremia (FIG. 28B). The data reveal that all three mice receiving control plasmid had high levels of virus in the blood as early as day 2 after infection. 2 of 3 mice receiving either DG-E or DG-H had no viremia, while one mouse from each group had a 1-2 day delay in viremia. No mice receiving DG-K had any viremia. We then measured the virus titers in the brains, testes and spleens of mice on day 7 (FIG. 28C). All mice receiving the control treatment had very high titers in each organ. The mice that presented delayed viremia in FIG. 33B, showed reduced titers in the brain, and similar titers in other organs. All other mice were fully protected with no detectable virus in any tissue.

[0112] FIG. 28: ZIKV candidate DVGs -E, -H and -K protect AG129 mice from ZIKV infection. AG129 mice (male, 5-6 weeks) were injected a mix of 20 ug of DVG-encoding plasmid (or a mock plasmid control) in a transfection mix and 10⁴ PFU of ZIKV. (A) Weight loss was monitored daily. Only mice transfected with mock plasmid lost weight by 7 days. (B) Viremia was followed daily. While mice transfected with mock plasmid exhibited a similar viremic profiles, only one out of three mice showed delayed viremia for DVG-E and DVG-H. All other mice (including those transfected with DG K) did not display viremia at any time point. (C) 7 days p.i. mice were euthanized and brain, testes and spleen collected. Infectious virus was only detected in mice that displayed viremia.

[0113] Method of VLP packaging : Uninfected or infected Vero cells (producer cells, MOI 1 PFU/cell at 24 h) in 24-well plates were transfected with 100 ng of DVG replicon RNA, WT replicon (positive control) or inactive replicon (negative control), using TransIT-mRNA transfection reagent (Mirus Bio). 48 h p.t. the supernatant endonuclease-treated (25 Units/µl BaseMuncher, Expedeon) and used to infect naive Vero cells in 24-well plates (recipient cells). Replicon activity in recipient cells was assessed 24 h p.i. Donor and recipient cells were lysed in passive lysis buffer (Promega) and luciferase activity measured using the Nano-Glo luciferase assay system (Promega) in a Tecan infinite M200 pro plate reader (Tecan group). HEK-293T cells seeded in a 24 well plate were transfected with a mix of 200 ng of a CPrME-encoding plasmid, 200 ng of E₃₀-NS1, and 200 ng of the DVG-encoding plasmid (LT-1 transfection reagent, Mirus Bio). 72 h p.t., the medium was clarified by centrifugation. N naive recipient cells were infected with producer cell supernatant following endonuclease (Basemuncher, Expedeon) treatment, and successful packaging determined with luciferase measurement when using reporter DVG clones, or by RT-qPCR when using native DVG.

[0114] Method of VLP-DVGs in mice: 4-6 week old AG129 or C57BL/6 female mice were given a mix of Ketamine (10 mg/mL)/Xylazine (1 mg/mL) by intraperitoneal injection. Once anesthetized, mice were inoculated by a subcutaneous (footpad) route with vehicle (DMEM media), 10⁴ PFU of Zika virus alone, or complemented with DVG-containing VLPs (TIPs). C57BL/6 mice were treated with 2 mg of an IFNAR1 blocking mouse MAb (MAR-5A3, Euromedex) by intraperitoneal injection one day prior to infection. Weight loss and viremia were monitored at the indicated times after infection. Blood was collected from the facial vein in Microtainer blood collection tubes (BD) and allowed to clot at room temperature. Serum was separated by centrifugation and stored at -80° C. Viremia was quantified either by plaque assay or RT-qPCR on unextracted and diluted serum samples, as described previously¹⁹. Infected mice were euthanized by cervical dislocation. Spleen, ovaries, brain and injected footpads were harvested and homogenized with 600 µl DMEM supplemented with 2% FBS in Precellys tubes containing ceramic beads, using a Precellys 24 homogenizer (Bertin Technologies) at 5000 rpm for 2 cycles of 20 seconds. Homogenates were cleared by centrifugation, and the supernatant stored at -80° C. until virus titration or RT-qPCR. Viral burden in organs was measured either by plaque assay (expressed as PFU/g for organs) or by RT-qPCR (expressed as PFU equivalents relative to GAPDH) following RNA extraction using Direct-zol-96 (Zymo). The number of DVG or WT RNA genomes in mouse organs was normalized to GAPDH genomes, derived from a standard curve using mouse GAPDH primers (Supplementary Table 1) and RNA extracted from the respective organ of uninfected mice.

[0115] FIG. 29. Generation of DVG-A-carrying virus-like particles. (a) Assessment of DVG-A packaging ability by WT virus. Infected or uninfected cells were transfected with WT replicon, inactive replicon, DVG-A reporter, or DVG-A out-of-frame reporter RNA. 48 h post-transfection, the cell supernatant was collected from donor cells, depleted of naked RNA, and used to infect naive recipient cells, which were harvested 24 h later for measuring reporter activity. Luciferase activity in recipient cells is shown. ^{∗∗∗∗}= p≤ 0.0001 (by two-way ANOVA with Dunnet’s multiple comparison, as compared to uninfected cells) (b) Schematic illustration of VLP assays: HEK-293T cells were transfected with a CPrME, E30-NS1 and DVG -encoding plasmids. 72 h post-transfection the cell culture supernatant with DVG containing VLPs was harvested. (c) VLP assays using WT replicon and DVG-A reporter. Donor cells were transfected with WT replicon or DVG-A reporter plasmid, with or without (mock) CPrME and E₃₀-NS1. The cell culture supernatant was treated with nuclease and used to infect naive recipient cells. Reporter activity in recipient cells is shown. ^{∗∗∗∗}= p≤ 0.0001 (by two-way ANOVA with Dunnet’s multiple comparison, as compared to mock conditions). (d) Quantification of DVG-A genomes in VLPs generated using native DVG-A. Clarified and nuclease-treated supernatant from donor cells were subjected to DVG-A quantification using RT893 qPCR. Negative control refers to supernatant derived from cells transfected with the same amount of DVG-A-containing plasmid in the absence of CPrME or E₃₀-NS1. ^{∗∗∗}: p= 0.0004 (by two-tailed t-test). All graphs show the mean and SD; n=3 per group of a representative experiment. of three.

[0116] FIG. 30. Reporter activity in producer cells of packaging assays. (a) Infected or uninfected Vero cells were transfected with WT replicon, inactive replicon, DVG-A reporter or DVG-A out-of-frame reporter RNA. 48 h post transfection, the cell supernatant was collected from producer cells, depleted of naked RNA, and used to infect naive recipient cells (shown in FIG. 4a). Reporter activity in producer cells is shown. ^{∗∗∗}: p= 0.0004, ^{∗∗∗∗}= p≤ 0.0001 (by two-1011 way ANOVA with Dunnet’s multiple comparison, as compared to uninfected cells). (b) VLP assays using WT and DVG-A reporter. Donor cells were transfected with WT or DVG-A reporter with or without (mock) CPrME and E₃₀-NS1. The cell culture supernatant was treated with nuclease and used to infect naive cells. Replicon activity (72 h p.t.) in producer cells is shown. ^{∗∗∗∗}= p≤ 0.0001 (by two-way ANOVA with Dunnet’s multiple comparison, as compared to mock conditions). All graphs show the mean and SD; n=3 per group for a representative experiment of three.

[0117] DVG-A can be packaged into virus-like particles (VLPs) for in vivo delivery. To consider DVGs as a potential therapeutic agent, we may require an appropriate delivery method. Thus, we established a packaging system to encapsidate a DVG into virus-like particles (VLPs). We first had to confirm that this DVG could be encapsidated at all. To this end, we transfected uninfected or infected cells with DVG-A reporter or control WT replicon RNA. These cells, named ‘producer’ cells, should (if infected) produce WT virus progeny, as well as virions containing genomes that can be packaged. Transfer of the supernatant derived from infected producer cells to naive (recipient) cells enabled us to assess packaging of reporter-expressing genomes. Significantly higher WT replicon and DVG-A reporter activities were observed in recipient cells in the presence of WT virus, compared to background activity in the absence of virus, confirming that DVG-A was packaged by WT virus (FIG. 29a, producer cell reporter activity is shown in FIG. 30a). Comparatively, no increase in reporter activity was detected for the inactive replicon or DVG-A_out-of-frame, suggesting that replication is a requirement for genome packaging. Next we developed a VLP-producing system to encapsidate DVG-A in the absence of WT virus. Briefly, we transfected cells with plasmids encoding DVG-A, the structural proteins (CPrME) and the non-structural protein NS1, to enable packaging and replication of DVG-A, respectively (FIG. 29b). Packaging of DVG-A into VLPs was then assessed following transfer of supernatants onto naive recipient cells. Using reporter DVG-A, we confirmed that the reporter activity in recipient cells for packaged DVG-A was comparable to that of packaged WT replicon (FIG. 4c, producer cell reporter activity shown in FIG. 30b). Finally, we confirmed that native DVG-A was packaged into VLPs, as shown by RT-qPCR of transfected cell supernatants (FIG. 29d). Thus, DVG-A can be actively packaged into VLPs, which could serve as therapeutic interfering particles (TIPs) for in vivo evaluation.

[0118] FIG. 31. Zika virus DVG-A-carrying TIPs inhibit virus replication in mice. (a) Experimental design. 4-6 week old AG129 or C57BL/6 female mice (n=5) were inoculated with WT virus diluted in DMEM, mock TIP supernatant (from transfections performed with no structural proteins), or with supernatant confirmed to contain DVG-packaging VLPs (TIPs). C57BL/6 mice were treated with 2 mg of IFNAR1-blocking monoclonal antibody 24h prior to infection. At different times post-infection, sera were collected. 6 days p.i. mice were euthanized and organs harvested. (b-e) AG129 mice: (b) Weight loss of infected mice is shown as a % of weight at day 0. ^{∗∗}:p= 0.011; ^{∗∗∗∗}: p≤ 0.0001. (c) Viremia on days 2, 4 and 6 post infection. ^{∗∗∗}: p= 0.0007; ^{∗∗∗∗}= p≤ 0.0001. (d) Virus load in the injected footpad, spleen, ovaries and brain, 6 days p.i. ^{∗∗∗∗}= p≤ 0.0001. (e) DVG amounts in all organs collected measured by RT-qPCR. (f-h) C57BL/6 female mice that were given an IFNAR1-blocking monoclonal antibody 24 h prior to infection. (f) 3 and 6 days p.i. viremia was measured by RT-qPCR and is depicted as PFU equivalents/mL. ^{∗∗∗∗}= p≤ 0.0001. (g) 6 days p.i. mice were euthanized and virus load in organs measured by RT-qPCR. ^{∗∗∗∗}= p≤ 0.0001. (h) DVG-A amounts in all organs measured by RT qPCR. In all cases, two-way ANOVA with Dunnet’s multiple comparison was carried out comparing each condition to mice infected with WT virus only.

[0119] Zika virus VLP-DVGs reduce infection and virulence in mice. We next assessed the efficacy of these DVGs packaged as VLPs as an antiviral measure in mice. We used mice deficient in α/β and γ receptors (AG129 mice), as these are highly susceptible to Zika virus infection and disease progression. Mice were mock-infected (vehicle alone), infected with 10⁴ PFU of WT virus alone, or with a mixture of WT virus and DVG-A. Approximately 10 DVG-A genome copies per Zika virus infectious virion were used. As an additional control, mice received a mix of WT virus and supernatant from mock conditions of production (‘control TIPs’, generated in the absence of CPrME or NS1) (FIG. 31a). All mice lost weight by day 6, except mock-infected mice. At this time, TIP-treated (but not control TIP-treated) mice presented significantly lower weight loss than WT virus-infected mice (FIG. 31b). Further, unlike mice receiving WT virus alone or control treatment, TIP-treated mice presented significantly lower viremia at 2, 4 and 6 days p.i., with up to 2-log differences in virus titer (FIG. 31c). Viral loads in the footpads, spleens, ovaries and brains were also 1-2 log lower in TIP-treated mice on day 6, underscoring the protective effect of this TIP (FIG. 31d). While DVG-A RNA in circulating blood was below detection levels, we confirmed the presence of DVG-A RNA in the footpads of TIP-treated mice, and at lower quantities in the spleens, ovaries and brains (FIG. 31e). These results confirm that DVG-A TIPs successfully disseminate from the injection site to distal organs. In further support, we assessed TIP efficacy in a more immunologically competent mouse model. C57BL/6 mice were treated with IFNAR1-blocking monoclonal antibody before infection with Zika virus, with or without TIPs. Weight loss was not monitored, as mice do not lose weight nor succumb to infection under these conditions. Viremia was significantly lower in DVG-treated mice at 3 and 6 days p.i. (FIG. 31f). While we did not observe differences in viral loads in the footpads or spleens, viral loads in ovaries and brains were significantly lower in TIP-treated mice compared to control conditions, with up to 2-log difference in viral loads (FIG. 31g). As noted in AG129 mice, the high quantities of DVG-A at the injection site disseminated to the spleens, brains, and ovaries of TIP-treated mice (FIG. 31h).

[0120] Method in mosquitoes: Ae. aegypti mosquitoes were injected with 0.02pmoles RNA using Cellfectin transfection reagent (control RNA, DG H or DG K). 2 days post injection, mosquitoes were fed a bloodmeal containing 7 ₓ10⁵ pfu/mL ZIKV The ability of TIPs to attenuate infection was monitored by dissection of mosquito body parts at 8 or 13 days post infection and determination of viral load. At 13 d p.i. mosquitoes were also salivated to investigate whether transmission could be blocked in the presence of TIPs.

[0121] The results show that, in whole bodies of mosquitoes at 13 days p.i. there was a significant decrease in viral load in mosquitoes injected with DG H and DG K, suggesting virus attenuation in the mosquitoes in the presence of TIPs (FIG. 32 A). While at 8 d p.i. overall infection rates were not affected in control, DG H or DG K-injected mosquitoes, prevalence in the carcass was significantly affected (FIG. 32 B), suggesting that DGs attenuate virus dissemination in mosquitoes. Furthermore, while midgut titers were similar for all conditions, the only positive mosquitoes which were positive in the carcass reached lower titers than in control RNA-injected mosquitoes (FIG. 32 C). Finally, while at 13 d p.i. 7 out of 9 control RNA-injected mosquitoes were ZIKV positive in the saliva (and thus could potentially transmit the virus), no saliva was positive for DG H (n=13) and one out of 16 mosquitoes was positive for DG K injected mosquitoes (FIG. 32 D).

[0122] FIG. 32: ZIKV DG H and K inhibits virus replication, dissemination and transmission in experimentally-infected mosquitoes. Ae. aegypti mosquitoes were injected with 0.02pmoles RNA. 2 days post injection, mosquitoes were fed a bloodmeal containing 7 ₓ10⁵ pfu/mL ZIKV, and dissected at 8 or 13 d p.i. (A) Viral load in whole bodies of mosquitoes pre-injected with control (n=8), DG out of frame (n=11) or DG in frame (n=10) RNA, 13 d p.i. (B) Prevalence of ZIKV infection in the midgut or carcass of mosquitoes pre-injected with control (n=6), DG out of frame (n=10) or DG in frame (n=10), 8 d p.i. (C) Viral load in the midgut or carcass of the same mosquitoes from (B). (D) Percentage ZIKV-positive saliva in mosquitoes pre-injected with control (n=9), DG out of frame (n=13) or DG in frame (n=16), 13 d p.i. DG out of frame = DG H; DG in frame= DG K.

[0123] The identified ZIKV sequences are listed in FIG. 40.

[0124] ZIKV DVGs sequences are selected from the group consisting of: SEQ ID NO: 22 (ZIKV DVG-A), SEQ ID NO: 23 (ZIKV DVG-B), SEQ ID NO: 24 (ZIKV DVG-C), SEQ ID NO: 25 (ZIKV DVG-D), SEQ ID NO: 26 (ZIKV DVG-E), SEQ ID NO: 27 (ZIKV DVG-F), SEQ ID NO: 28 (ZIKV DVG-G), SEQ ID NO: 29 (ZIKV DVG-H), SEQ ID NO: 30 (ZIKV DVG-I), SEQ ID NO: 31 (ZIKV DVG-J), SEQ ID NO: 32 (ZIKV DVG-K) and SEQ ID NO: 33 (ZIKV DVG-L).

[0125] Preferred ZIKV DVGs sequences are selected from the group consisting of: SEQ ID NO: 22 (ZIKV DVG-A), SEQ ID NO: 24 (ZIKV DVG-C) and SEQ ID NO: 25 (ZIKV DVG-D).

[0126] Most preferred ZIKV DVGs sequences are slected from the group consisting of: ), SEQ ID NO: 26 (ZIKV DVG-E), SEQ ID NO: 32 (ZIKV DVG-K), SEQ ID NO: 33 (ZIKV DVG-L) and other possible DVGs within a cluster with the following characteristics; deletion results in in-frame deletion events in which the start site is between positions 500 and 900 nt, and in which the stop site of the deletion is between positions 2800 and 3400 nt of the ZIKV genome.

### Example 4: Chikungunya Virus (Chikv)

[0127] In this example, we document and characterize naturally occurring DVGs bearing deletions, arising during chikungunya virus infection in vitro and in vivo. From these, we selected the DVGs most likely to have interfering capacity based on their frequency and recurrence between replicates and/or their ability to be carried over multiple passages. We show that natural DVGs have a strong antiviral activity on chikungunya virus both in mammalian and mosquito cells in vitro, and demonstrate that interfering DVGs can be broad-spectrum against other alphaviruses. Finally, we show that DVGs can be introduced into the mosquito vector prior to infection to inhibit arbovirus dissemination.

[0128] Vero, Huh7, 293T and BHK cells were grown in Dulbecco’s modified Eagle’s medium (DMEM), containing 10% fetal calf serum (FCS), 1% penicillin/streptomycin (P/S; Thermo Fisher) and 1% non essential amino-acid (Thermo Fisher) in a humidified atmosphere at 37° C. with 5% CO₂. U4.4 and Aag2 cells were maintained in Leibovitz’s L-15 medium with 10% FCS, 1% P/S, 1% non-essential amino acids (Sigma) and 1% tryptose phosphate (Sigma) at 28° C.

[0129] The viral stocks were generated from CHIKV infectious clones derived from the Indian Ocean lineage, ECSA genotype (IOL; described in ¹⁷) or from the Caribbean strain, Asian genotype (Carib; described in ¹⁸). To test DVG interference activity, a CHIKV infectious clone containing the Gaussia luciferase gene under a subgenomic promoter was used (obtained from Andres Merits). In vitro transcription (IVT) with SP6 mMESSAGE mMACHINE kit (Invitrogen) was performed on Not I linearised plasmids prior to transfection in BHK using lipofectamine 2000 (Invitrogen). After one passage in Vero cells, the stocks were titered and kept at -80° C. before use.

[0130] Viral titration was performed on confluent Vero cells plated in 24-well plates, 24 hours before infection. Ten-fold dilutions were performed in DMEM alone and transferred onto Vero cells. After allowing infection, DMEM with 2% FCS, 1% P/S and 0.8% agarose was added on top of cells. Three days post infection, cells were fixed with 4% formalin (Sigma), and plaques were manually counted after staining with 0.2% crystal violet (Sigma).

[0131] Cells were seeded in 24-well plates to reach approximately 80% confluency the next day. For passage 1, virus was diluted in PBS to obtain a multiplicity of infection (MOI) of 5 PFU/cell (high MOI). Cells were incubated with the viral inoculum at 37° C. for 1 hour. Following virus adsorption, the inoculum was removed, the infected cells were washed with PBS, and replaced with the appropriate cell culture medium containing 2% (v/v) FCS. At 48-72 hour post infection, supernatant was harvested and clarified by centrifugation (12 000 x g, 5 min). The following passages were performed blindly, using a high volume (300 µl) of the clarified supernatant from previous passage to infect naive cells followed by the same procedure. A total of 10 passages were performed. Each passage was titered by plaque assay to determine at which passages DVG accumulation may have resulted in interference. At least three replicates were performed per cell type.

[0132] Sequencing. RNA of 100 ul of each sample supernatant was extracted using TRIzol reagent (Invitrogen) or ZR viral RNA kit (Zymo) following the manufacturer’s protocol. RNA was eluted in 15-30 µL nuclease-free water. After quantification using Quant-iT RNA assay kit (Thermo Fisher Scientific), RNA libraries were prepared with NEBNext Ultra II RNA Library kit (Illumina). Multiplex oligos (Illumina) were used during library preparation. The quality of the libraries was verified using a High Sensitivity DNA Chip (Agilent) and quantified using the Quant-iT DNA assay kit (Thermo Fisher Scientific). Sequencing of the libraries (diluted to 1 nM) was performed on a NextSeq sequencer (Illumina) with a NextSeq 500 Mid Output kit v2 (Illumina) (151 cycles).

[0133] Next generation sequencing data analysis. All analyses were performed using BBTools suite (Bushnell B. - sourceforge.net/projects/bbmap/). First, fastq files generated from sample sequencing were trimmed for low-quality bases and adaptors using BBDuk. Then, alignment was performed using BBmap and the appropriate CHIKV reference sequence (Carib - GenBank accession no. LN898104.1, IOL -GenBank accession no. AM258994). BBMap’s variant caller, CallVariants, reported deletion events, and the overall DVG frequency per sample was calculated as the sum of the number of junction read counts (n) corresponding to each DVG and normalised as 5/3 × n/N, where N denotes the 98th percentile of the coverage per position. Multiplying by 5/3 aims to correct for the detection limit. Indeed, even if reads are 150 nucleotides long, aligned portions are usually only 30 to 120 nucleotides long. This implies that a read starting 30 or less nucleotides upstream of the breakpoint will be aligned on the right side but not on the left side of the breakpoint, and thus, will not be considered as a DVG. Consequently we are missing (30+30)/150 = 60/150 = ⅖ of the deletions, and the counts must be multiplied by 5/3 as a correction factor. Heatmaps illustrate the deletion score per nucleotide position based on deletion events removing that particular position. Specifically, scores were computed as the sum of the number of reads per million reads (RPM) supporting the deletion of a specific nucleotide position. For plotting start/stop breakpoints, deletions with lengths below 10 nucleotides were discarded.

[0134] Cloning selected defective genomes. Defective genomes selected from passages were cloned in the CHIKV infectious clones (under SP6 promoter) corresponding to their strain, using the previously described In Vivo Assembly (IVA) method¹⁹ or using In-Fusion reagent (Takara Bio Reagent). Primers were designed using SnapGene software, with a melting temperature of 60° C., and obtained from Integrated DNA Technology (IDT). 50 µl PCR using either Phusion high fidelity DNA polymerase (Thermo Fisher) or Q5 DNA polymerase (NEB) was carried out with a melting temperature of 57° C. for Phusion enzyme or 65° C. for Q5 polymerase. 18 cycles were carried out and the PCR products were then Dpn I(Thermo Fisher)-treated for at least 2 hours to remove the plasmid template and purified (Macherey Nagel PCR and gel purification kit). When IVA technique was used, 2 ul of the PCR products were directly transformed in XL10-Gold extra competent cells (Stratagene) according to supplied protocol. When In-Fusion reaction was needed, PCR products were ligated using In-Fusion reagent (Takara Bio Reagent) following supplier instructions and 1 ul was transformed in Turbo cells (NEB).

[0135] Luciferase assay to test DG interference activity. IVTs were performed using the SP6 mMESSAGE mMACHINE kit (Invitrogen) from Not I linearized infectious clones of DVG and CHIKV Carib-GLuc (see above). RNA production was quantified by Qubit RNA TS Assay kit (Thermo Fisher) and diluted to be at the indicated molar ratios compared to the Carib-GLuc CHIKV. Mixed DVG and full genome RNA were transfected in 293T or U4.4 cells seeded in 96-well plates with TransIT-mRNA transfection kit (Mirus) following the supplier’s protocol (25 ng of Carib-GLuc CHIKV per well). The medium was changed 4 hours post transfection to avoid cellular toxicity. 48 hours after transfection, supernatant was collected and mixed with coelenterazine (supplied by Y. Janin, Institut Pasteur) at a final concentration of 0.05 µM and luminescence was measured on a Tecan Infinite 200 microplate reader. When tested with non-luciferase expressing viruses, the procedure was followed the same way but the supernatant was titered by plaque assay 48 hours post transfection.

[0136] RT-qPCR to test for DVG self-replication. 50 ng of DVG or CHIKV Carib IVT was transfected in 293T cells (seeded the day before in 48-well plates), in triplicate, as described above. 8 hours post transfection, supernatant was removed, and cells were washed 3 times with PBS before adding fresh medium. At 8, 20, 28 and 44 hours post-transfection, 200 ul of lysis buffer from ZR 96 viral RNA kit (Zymo) was added on the cells after supernatant removal and stored at -20° C. until all time points were collected. Cellular RNA was extracted with the ZR 96 viral RNA kit and eluted in 15 µl. TaqMan RNA-to-Ct One-step RT-PCR kit (Applied Biosystems) was used to perform a quantitative RT-PCR spanning the 5’UTR-nsP1 region, with 5′-GAGACACACGTAGCCTACCA-3′ as the forward primer, 5’-GGTTCCACCTCAAACATGGG-3′ as the reverse, and 5’- [6-FAM] ACGCACGTTGCAGGGCCTTCA-3′ as the probe. After 20 min at 50 °, and 10 min at 95 °, 40 cycles were performed (95° C. for 15 seconds followed by 60° C. for 1 minute).

[0137] Mosquitoes. Aedes aegypti female mosquitoes belonging to the 7th generation from wild mosquitoes collected in Kamphaeng Phet Province (Thailand) were grown at 28° C., 70% relative humidity and a 12 hour light: 12 hour dark cycle, and fed with 10% sucrose. A day before blood feeding, 6 to 10-day old females were selected and starved for a day. A blood meal containing 10⁶ PFU/ml of CHIKV was offered to a pool of 60 females through a membrane feeding system (Hemotek Ltd) set at 37° C. with a piece of desalted pig intestine as the membrane. Following the blood meal, fully engorged females were selected and incubated at 28° C., 70% relative humidity and under a 12 hour light: 12 hour dark cycle with permanent access to 10% sucrose. After 7 days, the mosquitoes were sacrificed and dissected to collect heads, thorax, midgut, legs and wings (legs/wings), and abdominal wall (body). Each organ was ground in 300 ul of L15 supplemented with 2% FBS with Qiagen TissuLyser 2 machine, then clarified by centrifugation before titration and RNA extraction with TriZol reagent for RNA deep sequencing. One hundred and fifty nanograms of RNA produced by in vitro transcription (as described above) and purified by phenol-chloroform was mixed with Leibovitz’s L-15 medium and Cellfectin II Reagent (Thermo Fisher) following the supplier’s instructions. For each condition, forty 6 to 8 day-old females were injected intra-thoracically with 300nl of this mix with Nanoject III Nanoliter Injector (Drummond scientific company). Two days later, after a night of starvation, mosquitoes were fed with an infectious blood meal of 10⁶ PFU/ml of CHIKV Carib-GLuc as described above. After 5 days, mosquitoes were sacrificed; midgut and carcass were dissected and ground as mentioned before. Each sample was then tested for luciferase activity and titered by plaque assay.

[0138] Generation of defective viral genomes (DVG) by in vitro high MOI passage. In order to capture deleted DVGs that may arise in cell culture, the Caribbean strain of chikungunya virus (CHIKV Carib) was serially passaged in triplicate at high MOI in mammalian (Vero, Huh7) and mosquito (Aag2, U4.4) cells. RNA was extracted from the clarified supernatant of each replicate at each passage and RNA deep sequencing was performed. Reads were analyzed with the Bbmap pipeline to describe and quantify DVGs by identifying sequence reads that contain deletions. As expected, the amount of DVGs between the first and last passages increased by between 1 and 5 orders of magnitude in all cell types, and the rates and oscillations differed with each cell type (FIG. 33A).

[0139] Characterization of the DVGs generated in vitro. Next, we pooled the data for all passages and replicates from each cell, to identify potential deletion hotspots in the different cell types. The resulting heat map (FIG. 33B) reveals the frequency at which each nucleotide position was deleted (regardless of the total length of the deletion), where the x-axis indicates the nucleotide position along the full chikungunya virus genome. Each row represents a different cell type. We observed clear differences in regions with higher frequencies of deletion between cell types, suggesting that the same viral strain generates different deletion variants depending on the host environment. In Vero and Huh7 cells, deletions were abundant in a region spanning the non-structural proteins nsP1-nsP2, yet the hotspot profile was shorter in HuH7 compared to Vero cells. In Aag2 cells, the probability of deleting a nucleotide was more widely spread across the genome. Contrary to the other cell lines, where deletions occurred in the first half of the chikungunya virus genome, DVGs generated in U4.4 cells more often exhibited deletions in the second half of the genome (from nucleotides 6000 [nsP3] to 11500 [3’UTR]). Of note, the same experiment with the CHIKV IOL (Indian Ocean Lineage) strain had similar deletion profiles as the CHIKV Carib strain in Vero and Aag2 cells. However, CHIKV IOL deletions differed strongly in Huh7 (where the strongest hotspot is from nucleotides 9000 [E2] to 11000 [3’UTR]) and in U4.4 cells (whose profile in this case was similar to the profile obtained in Aag2 cells) (FIG. 33B). Taken together, these results suggest that both the virus strain, as well as the cellular environment, influence the generation and maintenance of DVGs during passaging in vitro. To visualize the different DVGs in these viral populations, the specific start (x axis) and stop (y axis) breakpoints of individual DVGs with deletions of >100 nucleotides were plotted (FIG. 33C). The analysis revealed predominant DVGs forming three clusters (cluster A, B and C) based on the location and the size of the deletion that was observed in all cell types, while a fourth cluster (cluster D) was more prominent in mosquito cells. Cluster A presented relatively small deletions of approximately 2500 nt, between the nsP1 and nsP2 genes. Cluster C presented large deletions of over 9000 nt from the end of nsP2 to the beginning of the 3’UTR, and for cluster B, an even larger deletion spanning nsP1 to the 3’UTR. In Aedes mosquito cells (Aag2 and U4.4) but less so in mammalian cells, another cluster D was present with deletions of approximately 5000nt between nsP3 to the 3’UTR.

[0140] Generation of chikungunya DVGs in mosquitoes in vivo. To see if DVGs were also generated during in vivo mosquito infection, we fed Aedes aegypti mosquitoes an infected blood meal containing 10⁶ PFU/ml of the Caribbean strain of chikungunya virus. After allowing the infection to disseminate throughout the mosquitoes over seven days, we sacrificed and dissected ten of them to collect individual organs: midgut, abdominal wall (body), thorax, heads and legs/wings (FIG. 34A). RNA was extracted and sequenced, and the data were analyzed using the BBmap pipeline. The plots of the DVG start and stop positions showed similar patterns to the data generated in Aag2 cells (FIG. 34C), with four distinct clusters (FIG. 34B). In two mosquitoes out of ten (FIG. 34C), we found the same DVG (named CM1) in several organs (midgut, body, head and legs/wings for one mosquito and midgut, body and head for the other mosquito). No other mosquitoes, nor the viral stock used to infect them, contained this DVG-CM1. These results indicate that DVGs are readily generated in the mosquito host, and that they share similar deletion profiles as what was observed in cell culture.

[0141] Chikungunya DVG candidates are non replicative. Our goal in the previous sections was to uncover all of the possible DVGs generated during virus infection and to down-select from the hundreds of individual DVGs, those that would most likely and efficiently compete with wild type virus. In other words, to identify which of the total DVGs would be the most potent defective interfering particles. Our rationale was that such DVGs would occur more frequently at high MOIpassage, and would increase to higher frequency over time as the DVG competes with wildtype virus for resources. DVGs were thus selected based on criteria that would be indicative of higher fitness vis à vis the wildtype competitor: having high frequency, being maintained throughout the passage series and occurring in several replicates. In addition to DVG-CM1, carrying a deletion from nucleotide 2695 (middle of nsP2) to nucleotide 5358 (end of nsP3) (FIG. 35A), we selected and cloned another 19 DVGs, from the cell passage deep sequencing data of CHIKV Carib (described above) and CHIKV IOL. Representatives from all four clusters were selected (FIG. 35A). We named DVGs according to their virus strain of origin (C for CHIKV Carib and I for CHIKV IOL) and the cell in which they were generated (V for Vero, H for Huh7, A for Aag2 and U for U4.4, M for in vivo mosquito). Their genomic composition is shown in FIG. 35A and their exact deletions are listed in Table 1. Three additional candidates did not belong to any defined cluster, but were present at high frequency in several replicates and were maintained throughout passages (Table 1). To confirm that the selected DVGs were indeed defective genomes, unable to self-replicate in absence of virus, we transfected in vitro transcribed RNA of each DVG or wild type virus in 293T cells. We harvested each DVG- or control-transfected cells at 8, 20, 28, and 44 hours post transfection, extracted RNA from the cells and performed a RT-qPCR. Contrary to CHIKV Carib full-length virus RNA that had an increasing RNA copy number throughout the timepoints, all DVG RNA copy numbers decreased over time, reflecting the progressive degradation of transfected RNA, and demonstrating that none of the candidate DVGs could self-replicate (FIG. 38).

[0142] Chikungunya DVGs interfere with wild type virus in vitro. We next tested the interference activity of the 20 DVGs derived from either mammalian cell culture (FIG. 39B) or mosquito host environments (FIG. 39C) in mammalian cells. We chose 293T cells for their high transfectability, and a CHIKV Carib virus expressing Gaussia luciferase under a sub-genomic promoter (CHIKV Carib-Gluc) as the target virus for rapid quantification. To test the DVGs that were derived from mammalian or mosquito cell culture, 293T cells were transfected with a mix of in vitro transcribed RNA corresponding to one DVG of interest (or a control RNA) and the CHIKV Carib-Gluc full length virus RNA at a 1:1 or 10:1 molar ratio. Supernatants were harvested at 48 hours to measure luciferase activity as a surrogate measure for wild type virus replication, since titers and luminescence correlated (FIG. 39). At a 1:1 molar ratio, most DVGs did not reduce wild type virus luciferase expression, but transfection of IV1 and IH1 showed a modest decrease (p< 0.05). However, increasing the amount of DVG RNA to 10 times that of CHIKV Carib-Gluc RNA significantly inhibited virus replication in nearly every case by 1 to 3 orders of magnitude (FIGS. 34B and C). Of note, the smallest DVGs with the largest deletions (CH2 and CH3 from cluster B) had no, or little, interference activity at the highest DVG:CHIKV Carib-Gluc molar ratio, with a decrease of less than 1 log (FIG. 35B). These results show that DVGs derived from both mammalian or mosquito cell culture can inhibit virus replication in mammalian cells when introduced exogenously.

[0143] To determine whether these mammalian and mosquito cell-derived DVGs could also inhibit virus replication in mosquito cells, we repeated the experiment in Aedes albopictus cells (U4.4). As for 293T cells, no interference was observed at a 1:1 molar ratio; but considerable inhibition with decreases of 1 to 2 log of luciferase activity was observed at 10:1 ratios for all of the DVGs that previously inhibited virus in mammalian cells, except for IV4. As seen in 293T cells, no interference was observed for DVG CV3 in mosquito cells (p>0.05) (FIG. 35D), which along with CH3, were the only two of 20 DVG candidates to fail to inhibit virus in any condition. On the other hand, most of the mosquito cell-derived DVGs that could inhibit virus in 293T cells completely lost their interference activity in mosquito cells; only DVG CA2, CA3 and CM1 significantly reduced luciferase activity by 1 to 2 log in U4.4 cells at a molar ratio of 10:1 (FIG. 35E).

[0144] Chikungunya DVGs can be broad-spectrum inhibitors. The chikungunya virus Indian Ocean lineage belongs to the East, South and Central African (ECSA) genotype and has approximately 7% nucleotide divergence with the chikungunya virus Caribbean strain that belongs to the Asian genotype²⁰. In the previous experiments, DVGs derived from either the Indian Ocean Lineage or Caribbean strains were tested against the Caribbean strain virus expressing Gaussia luciferase. Importantly, all of the CHIKV IOL-derived DVGs inhibited the Caribbean strain, showing that DVGs can act broadly within the same virus species (FIGS. 35B,C,D,E). To extend these results, we repeated the same experiment in 293T using CHIKV IOL strain as the target virus. In this case, we measured inhibition by virus titer instead of luminescence. Most DVGs resulted in reduced virus titers, either modestly or significantly, whether they were identified from mammalian (FIG. 36A) or mosquito (FIG. 36B) environments.

[0145] We next investigated whether CHIKV DVGs could inhibit even more broadly within the alphavirus genus. We carried out the same experiment in 293T cells with O’nyong’nyong virus (ONNV, CHIKV’s closest relative) or Sindbis virus (SINV, a very distant relative) as the targets. While the inhibitory effect was lost for most DVGs, some DVGs still significantly inhibited O’nyong’nyong virus (CV2 and CH1) (FIG. 36C). Of the mosquito-derived DVGs, CM1 maintained inhibitory activity with close to no detectable O’nyong’nyong virus titers (FIG. 36D). When tested against the distantly related Sindbis virus, interference activity was lost for all DVGs, but for CM1 that inhibited Sindbis virus by 2 logs (FIGS. 36E,F). These results confirm that some DVGs derived from one alphavirus can have inhibitory activity on different strains, including closely, and in some cases more distantly related viruses from the same genus.

[0146] Chikungunya DVGs block viral dissemination in vivo, in Aedes aegypti mosquitoes. After demonstrating that DVGs can be used to limit/inhibit infection in vitro, we tested if their interference activity could be used to block infection or dissemination in the mosquito host. To do so, we injected purified RNA of the CV4, IH1 or CM1 DVGs, a control RNA, or PBS into Aedes aegypti mosquitoes 2 days prior to feeding them with a blood meal containing the CHIKV Carib-Gluc virus. Five days post infection, mosquitoes were sacrificed and midguts were dissected from the rest of the carcass (FIG. 37A). Virus replication was measured in each mosquito by quantifying luciferase activity. Replication in the midgut was similar in all mosquitoes regardless of whether interfering DVG candidates were present or not. However, replication was significantly reduced in CV4- and CM1-treated mosquito carcasses (FIG. 37B). Virus in midguts (representing infection) and carcass (a proxy for viral dissemination) was then quantified, and classified as positive or negative, depending on whether infectious viruses were detected or not (limit of detection 30 PFU per organ). All groups had a similar proportion of positive midguts (between 81 and 91.7%) (FIG. 37C), confirming that the number of infected mosquitoes following bloodmeal feeding was similar for each group. On the other hand, virus dissemination was significantly impacted by the presence of DVGs: mosquitoes injected with either CV4, IH1 or CM1 DVGs had lower dissemination rates compared to PBS injected mosquitoes (16.7%, 47.6% and 41.7% of total infected mosquitoes in each group) (FIG. 37C). These results confirm that DVGs can impact viral replication and dissemination in vivo, in the mosquito host

[0147] FIG. 33: Generation of chikungunya virus (CHIKV) defective viral genomes (DVGs) in different hosts in vitro. The Caribbean strain (Carib) and Indian Ocean lineage (IOL) of CHIKV was passaged at high MOI in mosquito (U4.4, Aag2) or mammalian (Vero, Huh7) cells in triplicate. For each passage, the supernatant harvested from the previous passage was used to infect fresh cells. The infection lasted 48 to 72 hours. (A) DVG accumulation through passages. Total frequency of CHIKV Carib DVG arising in each replicate in 2 mammalian cell lines (Vero, Huh7) and 2 mosquito cell lines (Aag2, U4.4), determined after RNA deep-sequencing of each sample and quantification of DVG with Bbmap pipeline output. Samples with coverage under 200 were excluded from analysis. DVG count is represented in log scale (y axis) at each passage (x axis). (B) CHIKV Carib or IOL DVG heat maps in different cell types. The viral population of each passage was deep sequenced (RNAseq) and analyzed through BBmap pipeline. An average of all passages and replicates of the normalized frequency of each deleted nucleotide position (x axis) throughout the full genome is shown as a heat map (shades of orange), for each different cell type (y axis). (C) Analysis of the deletions generated by high MOI passages by CHIKV Carib. Start (x axis) and stop (y axis) positions of the breakpoint of DVGs generated are plotted for each cell types. The different clusters are called A, B, C, D.

[0148] FIG. 34: Generation of chikungunya DVGs in mosquitoes in vivo. (A) Thai Aedes aegypti mosquitoes were fed a blood meal infected with 10⁶ PFU/ml of CHIKV Carib. After 7 days, ten mosquitoes were sacrificed and midgut, abdominal wall (body), thorax, head and legs/wings were dissected. After verification of infection by titration, viral RNA was extracted and deep-sequenced. (B) Analysis of the deletions generated by CHIKV Carib in nine infected mosquitoes pooled together. Start (x axis) and stop (y axis) positions of the breakpoint of DVGs generated are plotted for each organs. (C) Start (x axis) and stop (y axis) positions of the breakpoint of DVGs generated in the different organs of 2 individual mosquitoes. The red dots represent the deletion starting at 2695 and ending at 5358, this DVG is called CM1. The number next to it indicates the number of reads per million reads (RPM).

[0149] FIG. 35: Defective viral genomes can interfere with chikungunya virus replication. (A) Schematic of the DVG candidates and the cell type and strain from which they were (C Carib, I IOL). (B-E) Measurement of DVG activity in vitro. Each DVG candidate identified from mammalian cell passage (B,D) or mosquito cell passage (C,E) was co-transfected with CHIKV Carib-luciferase at 1:1 or 10:1 molar ratio in 293T cells (B,C) or U4.4 cells (D,E). After 48 hours, luciferase activity was measured. (Representative result of one experiment out of three independent experiments is shown, n=3, ^{∗}p<0.05, ^{∗∗}p<0.01, ^{∗∗∗}p<0.001, ^{∗∗∗∗}p<0.0001, ns non significant compared to wild type after Dunnett’s multiple comparisons on one-way ANOVA test.)

[0150] FIG. 36: Defective viral genomes have broad-spectrum inhibiting activity in the alphavirus family. The DVGs identified in mammalian cell passage (A,C,E) or mosquito cell passage (B,D,F) were tested for inhibition of CHIKV IOL (A, B), O’nyong-nyong virus (ONNV) (C, D) and Sindbis virus (SINV) (E, F). DVG candidates were co-transfected with CHIKV IOL (A,B), ONNV (C,D) and SINV (E,F) at 10:1 molar ratio in 293T cells. After 48 hours, viral titer was measured. (Representative result of one experiment out of three independent experiment, n=3, ^{∗}p<0.05, ^{∗∗}p<0.01, ^{∗∗∗}p<0.001, ^{∗∗∗∗}p<0.0001, ns non significant compared to wild type after Dunnett’s multiple comparisons on one-way ANOVA test)

[0151] FIG. 37: Defective viral genomes prevent viral dissemination of chikungunya virus in Aedes aegypti mosquitoes. (A) 150 ng of DVG candidate RNA (IH1, CV4 or CM1), a control RNA or PBS were injected into Aedes aegypti mosquitoes 2 days prior to being fed an infected blood meal containing 10⁶ PFU/ml. After 5 days, mosquitoes were sacrificed, and midguts were separated from carcasses. (B) Luciferase activity of midgut or carcass of each mosquito was measured. (C) After virus titration, the proportions of positive midguts or carcasses (eg PFU≥100 PFU/ml) were determined. (Representative result of one experiment out of two independent experiments is shown, n=24, ^{∗}p<0.05, ^{∗∗}p<0.01, ^{∗∗∗}p<0.001, ns non significant compared to PBS after one-way ANOVA with multiple comparison (B) or Chi square test, multiple comparison with Holm correction (C)).

[0152] FIG. 38: Chikungunya virus DVGs are not self-replicating. 293T cells were transfected with DVG or CHIKV Carib in vitro transcribed RNA and harvested at 8, 20, 28 and 44 hours post transfection. Cellular RNA was extracted and used to perform a RT-qPCR with a Taqman probe

[0153] FIG. 39: Measuring DVG activity in vitro by virus titration. In vitro transcribed RNA of each DVG candidate (derived from mosquito cells) was co-transfected with CHIKV Carib-luciferase RNA at 1:1 or 10:1 molar ratio in U4.4 cells. After 48 hours, samples were titered and luciferase activity was measured (FIG. 34E). (n=3, ^{∗∗}p<0.01, ^{∗∗∗∗}p<0.0001, ns non significant compared to wild type after Dunnett’s multiple comparisons on one-way ANOVA test.).

[0154] FIG. 41 lists characteristics of CHIKV DVGs studied. DVG, defective viral genomes; CHIKV, chikungunya virus; Deletion location, the region of the genome affected by the deletion that may include envelope proteins (E), nonstructural proteins (NSP) or 3’untranslated region (3’UTR).

### Discussion

[0155] Described in nearly all RNA virus families^{6,21} and often considered a waste product of viral replication, defective interfering particles, and more broadly speaking DVGs, have recently garnered attention for their possible use as antiviral tools^{15,6,22-26}. Indeed, the presence of DVGs in natural human infections correlates to milder disease in clinical studies on respiratory syncytial virus and influenza virus^{10,13}; and influenza defective interfering particles protect mice against lethal challenge^{22,23,27}. In this study, we aimed to characterize, as widely as possible, the DVGs bearing deletions that arise during chikungunya virus infection in vitro in mammalian and mosquito environments and in vivo in its mosquito host. We show that chikungunya DVGs arise in all environments, in vitro and in vivo, but their type and abundance depend on the host and cell type, and on the virus strain, highlighting that both cellular environment and the viral genome bear determinants of DVG generation. For example, cluster D is strongly represented in both Aedes spp. mosquito cells, even though the deletion does not occur at the exact same position, but it is very rare in mammalian cells.

[0156] To find DVGs that could be useful as antivirals, we selected the most redundant DVGs, that arose in several conditions and were propagated over passages, which we assumed to be indicative of higher fitness and the ability to be packaged by wild-type virus. When used in higher quantity relative to wild-type virus, most candidates showed promising inhibiting capacity. Of note, because smaller genomes should be replicated more quickly^{7,8}, the conventional dogma proposes that the smallest DVGs would most efficiently hijack the parental virus replication machinery and outcompete wild-type virus. However, in our work, the smallest DVGs identified (two DVGs from cluster B) had no or very little interference activity. This observation implies that strict competition for the replicase and replication speed is not the only mechanism by which DVGs interfere with parental virus, and that their previously described immunostimulatory activity^{7,9-11,28-33} or the competition for structural protein resources^{8,34} may also play an important role. Importantly, we used Illumina deep sequencing technology that only generates small reads to identify DVGs, making it close to impossible to identify DVGs with several deletions and/or major rearrangements. In the future, combining this approach with a long-read sequencing technology such as nanopore might generate an even more complete picture of the nature of DVGs generated in the chikungunya virus population and inform in their mode of action.

[0157] Of the DVGs generated in Aedes aegypti in vivo, CM1 attracted our attention because it could cross bottlenecks in vivo. During a natural viral infection, after an infectious blood meal, the midgut is the first organ to be infected before the virus reaches the hemocoel to disseminate to all other organs³⁵. Several works in mosquitoes have shown that virus exit from the midgut is the main population bottleneck during mosquito infection with a drastic reduction in population size, followed by egress from the salivary glands, a mandatory step for viral transmission to the mammalian host through infected saliva³⁵⁻³⁹. CM1 was newly generated in the midguts of two independent mosquitoes and found to disseminate to the body wall, head and legs/wings of these same mosquitoes. The possibility that CM1 was generated de novo in other organs is unlikely because this DVG never appeared in any organs of any other mosquitoes that had not generated it in the midgut. It is not clear how or why CM1 is able to cross the midgut bottleneck. One possibility is that it belongs to a collective infectious viral unit, a structure that simultaneously contains and transports multiple viral genomes to a single cell, such as polyploid virions, aggregates of virions or virion-containing lipids vesicles^{40,41}. The possibility of collective infectious unit containing DVGs has already been proposed. Indeed, Leeks et al. modeled that if the viral population contains many DVGs, the collective infectious unit could become very large. Nonetheless, the presence of interfering DVGs would disfavor transmission within the collective infectious unit compared to free virions⁴². While CM1 had an inhibiting activity at high molar ratio compared to the parental virus, its frequency in mosquito samples was very low (4 to 176 reads per million).

[0158] A valuable characteristic of some of these interfering DVGs is their broad-spectrum activity, with inhibition not only on other chikungunya virus strains but also on other alphaviruses. This cross reactivity had already been reported with influenza and Sendai virus, since their DVGs were shown to be efficient vaccines or vaccine adjuvants in mammalian models not only against the virus from they were derived, but also against unrelated viruses^{15,22-26}. From a therapeutic point of view, this is of particular interest since the risk of worldwide dissemination of arthritogenic alphaviruses is well accepted^{3,43-47}, especially since no antivirals or vaccines against any of these viruses are currently licensed. In this context, any treatment (antiviral or vaccine) that could work across a viral genus or family would be helpful in facing outbreaks to come.

[0159] It will be important in the future to test if chikungunya DVGs could function as antivirals in mammalian in vivo models as well; however, a proper delivery system still needs to be developed. In previous work on influenza A and Sendai DVGs, authors isolated DVGs by ultra-centrifugation of a mix of wildtype virus and DVG on sucrose gradients^{15,11-16}. However, we could not successfully separate chikungunya DVGs from wild type virus using these methods. New approaches, such as delivering RNA or DNA in nanoparticles or nanostructured lipids^{48,49}, or attempting to package DVGs in virus-like particles (VLPs) could be explored. Another major hurdle to overcome is the choice of in vivo model. Wild-type C57BL/6 could be used, but as mice develop only a transient, mild infection, it would be difficult to demonstrate an inhibitory effect for even the best DVG candidates. While the most commonly used mouse models rely on interferon α/β knockouts^{50,51}, the induction of innate immunity would be excluded, which may be an important mechanism of action in chikungunya DVGs^{10,28-31,33}.

[0160] Finally, when injected in Aedes aegypti mosquitoes two days before an infectious blood meal, three DVGs significantly reduced viral dissemination from the mosquito midgut, thereby shifting the status of mosquitoes from being competent to incompetent vectors for chikungunya virus spread. This result is a proof of principle that DVGs might be useful tools in controlling chikungunya virus infection in the vector population. As releasing incompetent mosquitoes in the wild during an arbovirus outbreak has already been shown to be an effective epidemic control strategy^{52,53}, and despite the need for a simpler delivery system, it is tempting to propose that interfering DVGs could be used as a control strategy not only for chikungunya virus, but for any arbovirus. Furthermore, interfering DVGs are presumably safe antiviral tools because they are inert molecules that cannot self-replicate, and are only active when wild-type virus is present.

[0161] In conclusion, this work describes the different types of deleted DVGs generated during chikungunya virus infection in both vertebrate and invertebrate environments in vitro and in vivo in the mosquito vector. Moreover, we identified criteria to down-select the best defective interfering particle candidates able to inhibit wild-type chikungunya virus in vitro in both vertebrate and invertebrate hosts. An interesting observation is the broad-spectrum activity of some interfering DVGs able to interact with related alphaviruses. Finally, we show that pre-exposure to a DVG can modulate viral dissemination in mosquitoes in vivo. These results strengthen the idea that defective interfering particles might be a useful therapeutic tool for chikungunya virus infection as well as an efficient vector control strategy.

[0162] CHIKV DVGs sequences are selected from the group consisting of: SEQ ID NO: 34 (CHIKV DVG-IV1), SEQ ID NO: 35 (CHIKV DVG-IV2), SEQ ID NO: 36 (CHIKV DVG-IV3), SEQ ID NO: 37 (CHIKV DVG-IV4), SEQ ID NO: 38 (CHIKV DVG-IH1), SEQ ID NO: 39 (CHIKV DVG-IU1), SEQ ID NO: 40 (CHIKV DVG-CV1), SEQ ID NO: 41 (CHIKV DVG-CV2), SEQ ID NO: 42 (CHIKV DVG-CV3), SEQ ID NO: 43 (CHIKV DVG-CV4), SEQ ID NO: 44 (CHIKV DVG-CH1), SEQ ID NO: 45 (CHIKV DVG-CH2), SEQ ID NO: 46 (CHIKV DVG-CH3), SEQ ID NO: 47 (CHIKV DVG-CM1), SEQ ID NO: 48 (CHIKV DVG-CU1), SEQ ID NO: 49 (CHIKV DVG-CU2), SEQ ID NO: 50 (CHIKV DVG-CA1), SEQ ID NO: 51 (CHIKV DVG-CA2), SEQ ID NO: 52 (CHIKV DVG-CA3) and SEQ ID NO: 53 (CHIKV DVG-CA4).

[0163] Preferred CHIKV DVGs sequences are selected from the group consisting of: SEQ ID NO: 34 (CHIKV DVG-IV1), SEQ ID NO: 35 (CHIKV DVG-IV2), SEQ ID NO: 36 (CHIKV DVG-IV3), SEQ ID NO: 37 (CHIKV DVG-IV4), SEQ ID NO: 38 (CHIKV DVG-IH1), SEQ ID NO: 39 (CHIKV DVG-IU1), SEQ ID NO: 40 (CHIKV DVG-CV1), SEQ ID NO: 41 (CHIKV DVG-CV2), SEQ ID NO: 42 (CHIKV DVG-CV3), SEQ ID NO: 43 (CHIKV DVG-CV4), SEQ ID NO: 44 (CHIKV DVG-CH1), SEQ ID NO: 47 (CHIKV DVG-CM1), SEQ ID NO: 48 (CHIKV DVG-CU1), SEQ ID NO: 49 (CHIKV DVG-CU2), SEQ ID NO: 50 (CHIKV DVG-CA1), SEQ ID NO: 51 (CHIKV DVG-CA2), SEQ ID NO: 52 (CHIKV DVG-CA3) and SEQ ID NO: 53 (CHIKV DVG-CA4).

[0164] Most preferred CHIKV DVGs sequences are selected from the group consisting of: SEQ ID NO: 41 (CHIKV DVG-CV2), SEQ ID NO: 44 (CHIKV DVG-CH1), SEQ ID NO: 47 (CHIKVDVG-CM1), SEQ ID NO: 38 (CHIKVDVG-IH1) and SEQ ID NO: 43 (CHIKV DVG-CV4).

### Example 5: Rhinoviruses (RV)

### Generation and Characterization of DVGs Occurring Within Rhinoviruses

[0165] Method: Rhinovirus (RV) types used for the identification of defective viral genomes (DVGs) include RV-A01a (NC_038311.1), RV-A16 (L24917.1), RV-B14 (L05355.1), and RV-C15 (GU219984.1). Briefly, 12-well plates were seeded with 3.5 x 105 (350,000) H1—HeLa cells/well in complete media (DMEM, 10% FBS, 1% penicillin/streptomycin) and incubated overnight at 37° C./5% CO₂ to reach ~90% confluency. In the case of RV—C15 virus, the HeLa-E8 cell line was used. Next day, the cells were infected with wild type RV-A01a, RV-A16, RV-B14, and RV-C15 viruses at high (20) and low (0.1) multiplicity of infection (MOI). Following an hour of incubation at 34° C./5% CO₂, the virus was removed and the cells were washed with phosphate buffered saline (PBS) solution. Then, PBS was aspirated and one mL of infection media (DMEM, 2% FBS, 1% penicillin/streptomycin) was added. Cells were incubated at 34° C./5% CO₂, until complete cytopathic effect (CPE) was observed. Upon CPE, viruses were harvested by three repeated freeze-thaw cycles, and cell debris was removed by centrifugation (17,000 x g for 10 min at 4° C.). The viral supernatant was aliquoted and stored at -80° C. until ready to use. The supernatant was used to passage the virus into fresh cells. This process was repeated until passage 10 (FIG. 42). Prior to viral RNA isolation, 100 µL of the viral supernatant was treated with 5 µL of RNase A/T1 (Thermo Scientific) and the mixture was incubated for 1 hr at 37° C. After the RNase treatment, 300 µL of TRI reagent (Sigma) was added per 100 µL viral supernatant and mixed to homogeneity. Then, the RNA was isolated using the Direct-zol-96 RNA kit (Zymo Research). In-column DNase treatment was performed by following the manufacturer’s protocol. Five microliters of the isolated RNA (generally ≤1 ng/µL) was used for the library preparation. Libraries were prepared by using the NEBNext Ultra II RNA Library Prep kit for Illumina (New England Biolabs). Multiplex oligos (Illumina) were used during the library process. Quality of the library preparation was checked on a Bioanalyser 2100 (Agilent) using High Sensitivity DNA Chips. Sequencing of the libraries diluted to 1 nM was performed on a NextSeq 500 sequencer (Illumina) with a NextSeq 500 Mid Output kit v2.5 (Illumina) (151 cycles). The obtained sequences were analyzed through an in-house pipeline to identify DVGs.

[0166] Considering the presence of numerous RV types, we conducted our experiments with RV-A01a, -A16, -B14, and -C15, to make sure that all the RV species are represented within our dataset. These viruses were passaged up to 10 times at low and high-MOI in H1—HeLa cell line as described above (FIG. 42). Deep sequencing of samples and bioinformatics analysis identified all the deletion hotspots across the RV genome within the population. For all the RV types tested, the major deletion hotspots are contained within the P1 region (structural proteins) of the genome and they are all in-frame (FIGS. 43-46). Additionally, all the samples were RNase treated prior to RNA isolation and deep sequencing, suggesting that the identified DVGs can be packaged into the viral capsid. As it relates to the DVGs within the major hotspots, in all cases the cis-acting replication element (cre) was preserved, putting them in replicative advantage compared to the other DVGs.

[0167] The selection of TIP candidates was done based on the presence of hotspots, location along the genome, size of the deletions, and the frequency of appearance for each deletion within/across passages. The TIP candidates’ names include the RV type followed by the TIP number (e.g. B14-TIP-01) (FIG. 47 and FIG. 48).

[0168] FIG. 42. Methodology used for generating rhinovirus defective viral genomes. The overall process included blind passaging at low-/high-MOI, followed by viral RNA purification, deep sequencing, and data analysis to identify defective viral genomes (DVGs). Prior to passaging, 12-well plates were seeded with 3.5 x 10⁵ H1-HeLa cells/well in complete media (DMEM, 10% FBS, 1% penicillin/streptomycin) and then incubated for 24 hrs at 37° C./5% CO₂. For RV-A01a, RV-A16, and RV-B14, H1-HeLa cells were used; for RV-C15, HeLa-E8 cells were used. The day of the experiment, the cells (~90% confluency) were infected at an MOI of 0.1 (low-MOI) and an MOI of 20 (high-MOI). The infected cells were incubated for an hour at 34° C./5% CO2. Following the incubation, the virus was removed, the cells were washed with 1x PBS, and then fresh infection media (DMEM, 2% FBS, 1% penicillin/streptomycin) was added. Cells were incubated at 34° C./5% CO₂ until complete cytopathic effect (CPE) was observed. Upon CPE, the virus was harvested by three repeated freeze-thaw cycles, and the cellular debris was removed by centrifugation (17,000 x g for 10 min at 4° C.). The supernatant was used to passage the virus into fresh H1-HeLa cells. This process was repeated until passage 10.

[0169] FIG. 43. Passaging RV-A01a in H1-HeLa cells at high titers. (A) Major deletion cluster forms within the P1 (structural) coding region and defective viral genomes (DVGs) within this cluster are all in-frame. The graph represents the start vs. stop position of the identified deletions. Depending on the size of the deletions, the data was split into in-frame (left; red circles) and out-of-frame (right; cyan circles) deletions. Pooled data from all passages (P01-P10) and all replicates (n = 5). (B) Appearance of deletions as a function of the passage number (P01-P10). Each panel represents the pooled data from all replicates (n = 5). The top-row panels represent the in-frame deletions, whereas the bottom-row panels represent the out-of-frame deletions across the genome.

[0170] FIG. 44. Passaging RV-A16 in H1-HeLa cells at high titers. (A) Major deletion cluster forms within the P1 (structural) coding region and defective viral genomes (DVGs) within this cluster are all in-frame. The graph represents the start vs. stop position of the identified deletions. Depending on the size of the deletions, the data was split into in-frame (left; red circles) and out-of-frame (right; cyan circles) deletions. Pooled data from all passages (P01-P09) and all replicates (n = 5). (B) Appearance of deletions as a function of the passage number (P01-P09). Each panel represents the pooled data from all replicates (n = 5). The top-row panels represent the in-frame deletions, whereas the bottom-row panels represent the out-of-frame deletions across the genome.

[0171] FIG. 45. Passaging RV-B14 in H1-HeLa cells at high titers. (A) Major deletion clusters forms within the P1 (structural) coding region and defective viral genomes (DVGs) within these clusters are all in-frame. The graph represents the start vs. stop position of the identified deletions. Depending on the size of the deletions, the data was split into in-frame (left; red circles) and out-of-frame (right; cyan circles) deletions. Pooled data from all passages (P01-P10) and all replicates (n = 6). (B) Appearance of deletions as a function of the passage number (P01-P10). Each panel represents the pooled data from all replicates (n = 6). The top-row panels represent the in-frame deletions, whereas the bottom-row panels represent the out-of-frame deletions across the genome.

[0172] FIG. 46. Passaging RV-C15 in HeLa-E8 cells at high titers. (A) Major deletion clusters forms within the P1 (structural) coding region and defective viral genomes (DVGs) within these clusters are all in-frame. The graph represents the start vs. stop position of the identified deletions. Depending on the size of the deletions, the data was split into in-frame (left; red circles) and out-of-frame (right; cyan circles) deletions. Pooled data from all passages (P01-P10) and all replicates (n = 5). (B) Appearance of deletions as a function of the passage number (P01-P10). Each panel represents the pooled data from all replicates (n = 5). The top-row panels represent the in-frame deletions, whereas the bottom-row panels represent the out-of-frame deletions across the genome.

[0173] FIG. 47. Rhinovirus TIP candidates. (A) Rhinovirus (RV) -B14, (B) RV-A01a, (C) RV-A16 and (D) RV-C15 TIP candidates. The TIP candidates’ names include the RV type followed by the TIP number (e.g. B14-TIP-01). The deletions are indicated with horizontal red lines, whereas mutations are indicated with vertical red lines. On top of each figure panel the wild type genome for each viral type is presented (dark gray) with the location of the viral proteins indicated. The structural proteins in the same order as they appear: VP4, VP2, VP3, and VP1. Non-structural proteins in the same order as they appear: 2A, 2B, 2C, 3A, 3B, 3C, and 3D. The x-axis represents the viral genome length in nucleotides (nts).

[0174] FIG. 48. Details of Rhinovirus TIP candidates. Reported characteristics of each TIP candidate include: its ID, start and stop positions of the deletion, the length of the deletion (DEL LENGTH = STOP - START), mutations (if any), and whether the deletion keeps the open reading frame (ORF) in-frame or out-of-frame. If the deletion is divisible by 3 (remainder = 0), then it is in-frame, otherwise it is out-of-frame. Start and stop positions indicate the last remaining and the last deleted, respectively.

### Rhinovirus TIP Candidates Inhibit Wild-Type Virus In Vitro

[0175] Method: Prior to transfection, 96-well plates were seeded with 2.0 x 10⁴ H1-HeLa cells/well in complete media (DMEM, 10% FBS, 1% penicillin/streptomycin) and then incubated for 24 hrs at 37° C./5% CO₂ to reach ~90% confluency. The complete media was replaced with infection media (DMEM, 2% FBS, 1% penicillin/streptomycin) and the cells were co-transfected with wildtype and the selected TIP candidates at indicated molar ratios using the TransIT-mRNA transfection reagent. All the co-transfections were done in 1:1, 1:5, and 1:10 (WT:TIP) molar ratios and in triplicates (n = 3). In the case of WT RNA alone, the amount for “1” equals 25 ng of RNA. The transfected cells were incubated at 34° C./5% CO₂ for 48 hrs. Following the incubation, the virus was harvested by three repeated freeze-thaw cycles, and the cellular debris was removed by centrifugation (17,000 x g for 10 min at 4° C.). The titers of infectious virus were determined by plaque assay. As a control, WT RNA was co-transfected with control RNA (pTRI-Xef: Xenopus elongation factor 1α), which resulted in similar titers as WT alone. Additional controls, including the control RNA alone, TIP candidates alone, and a mock transfection were also tested, which yielded no infectious virus, as expected. Panrhinoviral activity of the best performing TIP candidate was tested the same way using WT RNA from RV-A01a and RV-A16.

[0176] Results indicate that from this select set of TIP candidates, B14-TIP-03 candidate performed the best by lowering the WT titers by almost 100-fold (FIG. 49 A ). As a safety feature, we generated a non-replicative variant (K13L) of the B14-TIP-03 and renamed it as “B14-TIP-06”. The B14-TIP-06 has similar antiviral activity as the B14-TIP-03 (FIG. 49 B). Incorporating the same mutation in the context of WT RNA did not generate a viable virus, as expected (FIG. 49 B). These results have important implications in terms of safety of the use of DVGs as potential TIPs.

[0177] Our in vitro results indicate that antiviral feature of B14-TIP-03 is panrhinoviral. Co-transfecting B14-TIP-03 with RV-A01a and RV-A16 reduce infectious viral titers significantly. Further enforcing the potential of B14-TIP-03 to be used as a broad-spectrum antiviral against multiple RV types.

[0178] FIG. 49. A panrhinoviral TIP candidate reduces wildtype titers in vitro. (A) RV-B14-WT and TIP-candidate RNAs were co-transfected into H1-HeLa cells to assess the efficacy of a select set of TIP candidates (B14-TIP-01, B14-TIP-03, and B14-TIP-10). All the co-transfections were done in 1:1, 1:5, and 1:10 (WT:TIP) molar ratios. In the case of B14-WT alone, the amounts for “1” equals 25 ng of RNA. As controls, RV-B14-WT RNA was either transfected alone or with control RNA (pTRI-Xef: Xenopus elongation factor 1^{α}). Additional controls, including the control RNA alone, TIP candidates alone, and a mock transfection were also tested, which yielded no infectious virus, as expected. (B) The non-replicative variant of B14-TIP-03 (K13L variant - within the 3C protein) TIP was constructed and renamed as “B14-TIP-06”. The B14-TIP-06 TIP candidate has similar antiviral activity as the B14-TIP-03 TIP candidate. Introducing the same mutation in the context of the WT genome was not viable, as expected. (C) Panrhinoviral activity of B14-TIP-03 was tested by co-transfecting the TIP candidate with RV-B14, RV-A01a, and RV-A16 wildtype genomes. The x-axis represents the WT:TIP samples tested as well as their molar ratios in parentheses, and the y-axis represents Log₁₀(PFU/mL). Each condition was tested at least in triplicates (n ≥ 3).

### Rhinovirus TIP Candidate Is a Potent Stimulator of Antiviral Innate Immunity In Vitro

[0179] Method : Prior to transfection, 96-well plates were seeded with 2.0 x 10⁴ H1-HeLa cells/well in complete media (DMEM, 10% FBS, 1% penicillin/streptomycin) and then incubated for 24 hrs at 37° C./5% CO₂ to reach ~90% confluency. The complete media was replaced with infection media (DMEM, 2% FBS, 1% penicillin/streptomycin) and the cells were co-transfected with WT and B14-TIP-03 at a 1:10 (WT:TIP) molar ratio using the TransIT-mRNA transfection reagent. The amount for “1” equals 25 ng of WT RNA. All the co-transfections were in triplicates (n = 3). The transfected cells were incubated at 34° C./5% CO₂ for 3 hrs and then washed with thee times with phosphate buffered saline solution in order to remove the input RNA and prevent it from interfering with RT-qPCR experiments. Then, the transfected cells were incubated at 34° C./5% CO₂ for 48 hrs. Following the incubation, the virus was harvested by three repeated freeze-thaw cycles, and the cellular debris was removed by centrifugation (17,000 x g for 10 min at 4° C.). To isolate the viral RNA, the Direct-zol RNA Miniprep Kit (Zymo Research) was used following the manufacturer’s recommended protocol. The total RNA was then reverse transcribed using SuperScript IV (ThermoFisher) reverse transcriptase enzyme and random hexamer primers following manufacturer’s recommended protocol. Then, 2 uL of 10-fold diluted cDNA was amplified using Power SYBR™ Green PCR Master Mix using gene-specific primers against retinoic acid-inducible gene I (RIG-I), melanoma differentiation-associated gene 5 (MDA5), interferon (IFN)- α1, IFN- β1, and IFN-λ1 genes. The relative fold-change calculations were done using the ΔΔCₜ analysis against mock transfected cells with glyceraldehyde 3-phosphate dehydrogenase (GAPDH) housekeeping gene as a control.

[0180] Results : Based on qPCR results, B14-TIP-03 is a potent stimulator of antiviral innate immunity. The co-transfection of RV-B14-WT and control RNA (pTRI-Xef: Xenopus elongation factor 1^{α}) resulted in mild induction of all the genes tested. On the other hand, the co-transfection of RV-B14-WT and B14-TIP-03 RNAs resulted in a significant increase in the gene expression of pattern recognition receptors (PRRs), such as RIG-I and MDA5. Additionally, the B14-TIP-03 also induced the gene expression of IFN-β1 and IFN-λ1, but not IFN-α1. These results indicate the major mechanism of action for the B14-TIP-03.

[0181] FIG. 50. The TIP candidate B14-TIP-03 is a potent stimulator of antiviral innate immunity. The fold change values are presented above each bar. All the co-transfections were done in 1:10 (WT:TIP) molar ratio. In the case of B14-WT alone, the amounts for “1” equals 25 ng of RNA. As a control, RV-B14-WT RNA was transfected with control RNA (pTRI-Xef: Xenopus elongation factor 1^{α}). The x-axis represents the WT:TIP samples tested, and the y-axis represents Log₁₀(PFU/mL). Each condition was tested in duplicates.

[0182] The identified DVGs are listed in FIGS. 51 and 52.

[0183] RV DVGs Sequences are selected from the group consisting of: SEQ ID NO: 55 (RV DVG A01a-TIP-01), SEQ ID NO: 56 (RV DVG A01a-TIP-02), SEQ ID NO: 57 (RV DVG A01a-TIP-03), SEQ ID NO: 58 (RV DVG A01a-TIP-04), SEQ ID NO: 59 (RV DVG A01a-TIP-05), SEQ ID NO: 60 (RV DVG A01a-TIP-06), SEQ ID NO: 62 (RV DVG A16-TIP-01), SEQ ID NO: 63 (RV DVG A16-TIP-02), SEQ ID NO: 64 (RV DVG A16-TIP-03), SEQ ID NO: 65 (RV DVG A16-TIP-04), SEQ ID NO: 66 (RV DVG A16-TIP-05), SEQ ID NO: 89 (RV DVG C15-TIP-01), SEQ ID NO: 90 (RVDVG C15-TIP-02), SEQ ID NO: 91 (RVDVG C15-TIP-03), SEQ ID NO: 68 (RV DVG B14-TIP-01), SEQ ID NO: 69 (RV DVG B14-TIP-02), SEQ ID NO: 70 (RV DVG B14-TIP-03), SEQ ID NO: 71 (RVDVG B14-TIP-04), SEQ ID NO: 72 (RV DVG B14-TIP-05), SEQ ID NO: 73 (RV DVG B14-TIP-06), SEQ ID NO: 74 (RV DVG B14-TIP-07), SEQ ID NO: 75 (RV DVG B14-TIP-08), SEQ ID NO: 76 (RV DVG B14-TIP-09), SEQ ID NO: 77 (RV DVG B14-TIP-10), SEQ ID NO: 78 (RV DVG B14-TIP-11), SEQ ID NO: 79 (RV DVG B14-TIP-12), SEQ ID NO: 80 (RV DVG B14-TIP-13), SEQ ID NO: 81 (RV DVG B14-TIP-14), SEQ ID NO: 82 (RV DVG B14-TIP-15), SEQ ID NO: 83 (RV DVG B14-TIP-16), SEQ ID NO: 84 (RV DVG B14-TIP-17), SEQ ID NO: 85 (RV DVG B14-TIP-18), SEQ ID NO: 86 (RV DVG B14-TIP-19) and SEQ ID NO: 87 (RV DVG B14-TIP-20).

[0184] Preferred RV DVGs sequences are selected from the group consisting of: SEQ ID NO: 55 (RV DVG A01a-TIP-01), SEQ ID NO: 62 (RV DVG A16-TIP-01), SEQ ID NO: 89 (RV DVG C15-TIP-01), SEQ ID NO: 68 (RV DVG B14-TIP-01), SEQ ID NO: 70 (RV DVG B14-TIP-03), SEQ ID NO: 73 (RV DVG B14-TIP-06) and SEQ ID NO: 77 (RV DVG B14-TIP-10).

[0185] Most preferred RV DVGs sequences are selected from the group consisting of: SEQ ID NO: 70 (RV DVG B14-TIP-03) and SEQ ID NO: 73 (RV DVG B14-TIP-06).

### Example 6: Yellow Fever Virus (YFV)

[0186] Generation and characterization of DVGs occurring within yellow fever virus passaging

[0187] Yellow Fever virus Asibi (YF-Asibi) strain and vaccine (YF-17D) strain were blindly passaged between 10 and 20 times in 12 biological replicates at high and low MOI in mammalian (SW13, Vero) and mosquito (C6/36) cell lines. FIG. 53 represents the titration, by focus forming assay method, of samples from all the passaging performed. The graphs show both virus titer, expressed in ffu/ml, in logarithmic scale, and MOI value for each passage. From each experiment 4 passages were selected for sequencing, chosen as the passage before a viral titer drop. Currently, samples from both high and low MOI infections of YF-Asibi and YF-17D in SW13 have been already deep sequenced, while the other samples are ready for the library preparation.

[0188] Computational analysis on sequenced passages identified all deletion hotspots across the genome and overall DVGs occurring within the population. FIG. 54 is a deletion heatmap resulting from the sequencing of passages of YF-17D and YF-Asibi at high and low MOI in SW13 cells. Each panel represents a different MOI, while each row is a different passage. The data shown here combines all biological replicates together. The nucleotide position is represented across the x-axis and spans the entire genome. Analysis reveals deletion hotspots are common to and conserved during the passaging, suggesting these DVGs are of higher fitness and can be packaged to infect new cells. Analysis of these data reveals deletion hotspots that are common to both high and low MOI. Moreover, some deletion hotspots are common to both viral strains. In FIG. 55 a further comparison of the DVGs found in the two YF strains is shown. The figure highlights a cluster of deletions in both virus strains that emerges and is conserved as the passage series progresses (suggesting high fitness of these DVGs).

[0189] The most conserved DVGs, schematically represented in Figure XX4, have been selected for de-novo synthesis of TIPs.

[0190] FIG. 53: Titration of blind passages. Each panel shows the samples collected during serial blind passagings of YF-17D and YF-Asibi on different cell lines. Samples were titrated using the focus forming assay (FFA) and here expressed as mean of the 12 replicates of each passage, in focus forming units per ml (ffu/ml). MOI for the calculated infection of each passage is showed as a mean of the 12 replicates (red bars).

[0191] FIG. 54: DVG identification in SW13 cells. YF-Asibi and YF-17D populations from selected passages were deep sequenced (RNAseq) and the normalized frequency of each deleted nucleotide position (x axis) throughout the YF genome is shown as a heat map. Each row within each panel represents a different passage. Each panel represents a different passage number for high and low MOI replicates for the two YF strains used.

[0192] FIG. 55: Identification of YF DVG hotspots in SW13 cells. Start (x axis) and stop (y axis) positions of the deletions were plotted for SW13 cell passages with YF-17D (A) and YF-Asibi (B). In frame (orange) and out of frame (cyan) deletions are showed for each passage analyzed. A clear hotspot was observed in the region with start and stop positions at approximately 500-3000nt start-stop, for both virus strains.

[0193] FIG. 56: Schematic representation of candidate YF DVGs. YFV candidate DVGs were chosen based on their conservation and frequency throughout passaging. The origin of each DVG is shown on the left side. Each letter on the left represents the provisional name of the DVG.

[0194] YFV DVGs sequences are selected from the group consisting of: SEQ ID NO:93 (YFV DVG-A), SEQ ID NO: 94 (YFV DVG-B), SEQ ID NO: 95 (YFV DVG-C), SEQ ID NO: 96 (YFV DVG-D), SEQ ID NO: 97 (YFV DVG-E), SEQ ID NO: 98 (YFV DVG-F), SEQ ID NO: 99 (YFV DVG-G), SEQ ID NO: 100 (YFV DVG-H), SEQ ID NO: 101 (YFV DVG-I), SEQ ID NO: 102 (YFV DVG-J), SEQ ID NO: 103 (YFV DVG-K) and SEQ ID NO: 104 (YFV DVG-L).

### Example 7: West Nile Virus (WNV)

[0195] West Nile virus Israel 1998 strain (WNV) was passaged at a high multiplicity of infection in BHK or C6/36 cells. Briefly, cells that were seeded to reach between 70-80% confluence were infected with an initial MOI of either 0.1 or 10 PFU/cell. Two days post infection, 3 µl or 300 µl of the infected cell supernatant (respectively) was used for infection in the subsequent passage. The passaging was repeated 10 times. FIG. 57 represents the titration (by focus forming assay method) as well as RNA quantitation (by RT-QPCR) of samples from all passages performed in BHK21 cells (FIGS. 57 A and B) and C6/36 (FIGS. 57C and D). The RNA extracted from the samples was also used for next-generation sequencing. Libraries prepared using the RNA Library Prep kit (Illumina) were loaded on an Illumina NextSeq500 sequencer, using 150 cycle single-end reads. The reads obtained were analyzed using the computational pipeline described above. Computational analysis on sequenced passages identified all deletion hotspots across the genome and overall DVGs occurring within the population. Analysis of data from at least 2 reads with at least 10 deleted nt. in at least 5 samples after 10 passages in BHK21 or C6/36 cells reveals that the deletion hotspots are scattered through the whole genome in both cell lines, but are more numerous in BHK21 cells (FIG. 58). FIG. 59 shows the deletion heatmaps resulting from the sequencing of passages of WNV at low and high MOI in BHK21 (FIGS. 59A and B ) and C6/36 (FIGS. 59C and D). Each row in each panel represents a different passage number. Analysis reveals deletion hotspots are common to and conserved during the passaging in mosquito cells (C6/36), suggesting these DVGs are of higher fitness and can be packaged to infect new cells, while deletion hotspots are much less defined for mammalian cells (BHK21). Certain deletion hotspots are unique to the C6/36 cell line and take over other deletions in terms of frequency, such as the deletion hotspot located in and around the E glycoprotein (FIGS. 59C and D). This cluster of deletions emerges earlier at low MOI (FIG. 59C, passage 4) that high MOI (FIG. 59D, passage 5) and is conserved at the next passage for both MOI. However, due to a drop in RNA after passage 5 at both MOI in C6/36 cells (see FIG. 57D) no deletion heatmap could be generated after passage 6. Hotspots deletions for C6/36 cell passages 4, 5 and 6 (high MOI) and 3, 4 and 5 (low MOI) were identified by plotting the start and stop positions of the deletions (FIG. 60). As already predicted by the heatmaps (see FIG. 59), a clear hotspot was observed in the region with start and stop positions at approximately 500-3000 nt start-stop for both MOI, at passage 3 for the low MOI, and at passage 4 for the high MOI, but only in-frame for both MOI (FIG. 60, compare the orange and blue dots).

[0196] Altogether, the data show the importance of using more than one cell line or host to determine the total breadth and overall fitness of DVGs in different conditions. These data highlights that there are also many differences between cell types, yet reveals a cluster of deletions that emerges as the passage series progresses (suggesting high fitness of these DVGs).

[0197] From these and other analyses, we selected a list of DVG candidates. The candidates, named numbered from 1 to 6, are shown in FIG. 61. The candidates span a variety of sizes and the deletions occur in different places in the genome, in and out-frame, representing a wider array of DVG candidates than could be identified using conventional passaging and isolation.

[0198] FIG. 57: Sample generation-Serial passaging. Each panel shows the samples collected during serial passaging of WNV on different cell lines. Samples were titrated using the focus forming assay (FFA) and here expressed as mean of the 3 replicates (and standard deviation) for each passage (x axis) in focus forming units per ml (ffu/ml; y axis). Multiplicity of infection (MOI) of 0.1 (light green) or 10 (dark green) is presented for BHK21 (panel A) and C6/36 cells (panel C). RNA quantitation was performed after RNA extraction from the cleared supernatant with Total RNA isolation Nucleospin kit. It is expressed as mean of the 3 replicates for each passage (x axis) in number of viral RNA copy per ml (viral RNA copy/ml; y axis) and presented for BHK21 (panel C) and C6/36 cells (panel D) for MOI of 0.1 (light green) or 10 (dark green).

[0199] FIG. 58: Deletion in WNV genome after 10 passages Analysis of data from at least 2 reads with at least 10 deleted nucleotides in at least 5 samples after 10 passages in BHK21 or C6/36 cells. Number and positions of the deletions are presented.

[0200] FIG. 59: Deletions heatmaps of WNV passaged in BHK21 or C6/36 cells WNV populations from the 10 passages in BHK21(panel A and B) or in C6/36 (panel C and D) cells were deep sequenced (RNAseq) and the normalized frequency (y axis) of each deleted nucleotide position (x axis) throughout the genome is shown as a heat map. Each row within each panel represents a different passage. Passages at high and low MOI are presented for each cell type.

[0201] FIG. 60: Identification of hotspot deletions in C6/36 cells Start (x axis) and stop (y axis) positions of the deletions were plotted for C6/36 cell passages with WNV. In frame (orange) and out of frame (cyan) deletions are showed for passages 4, 5 and 6 (high MOI) and 3, 4 and 5 (low MOI). A clear hotspot is observed in the region with start and stop positions at approximately 500-3000 nt start-stop for both MOI.

[0202] FIG. 61: Schematic representation of candidate WNV DVGs. WNV candidate DVGs were chosen based on their conservation and frequency throughout passaging in C6/36 cells. The WT genome is presented at the top, with encoded protein C (purple), prM (bleu), E (cyan), NS1 (dark green), NS2A (light green), NS2B (yellow), NS3 (orange), NS4A (brown), NS4B (pink) and NS5 (red), as well as 5′ and 3′ UTR (black line), and nucleotide numbering is indicated. Candidate DVGs are numbered from 1 to 6, and for each, location of the corresponding deletion is shown on the right. UTR: untranslated region; ORF: open reading frame.

[0203] WNV DVGs sequences are selected from the group consisting of: SEQ ID NO: 105 (WNV DVG-1), SEQ ID NO: 106 (WNV DVG-2), SEQ ID NO: 107 (WNV DVG-3), SEQ ID NO: 108 (WNV DVG-4), SEQ ID NO: 109 (WNV DVG-5) and SEQ ID NO: 110 (WNV DVG-6).

### EXAMPLE 7: Coronavirus (CV) - Identification of DVGs as Potential Antiviral Inhibitors Against SARS-CoV-2

[0204] Coronavirus SARS-CoV-2 strain (BetaCoV/ France/IDF0372/2020) was passaged at a high multiplicity of infection in Vero E6 cell. Briefly, cells were infected with an initial MOI of 5 x 10 \^5 PFU/cell. 3 days post infection, the infected cell supernatant was used for infection in the subsequent passage. The passaging was repeated 10 times. The overall process included passaging at high-MOI, followed by viral RNA purification, deep sequencing, and data analysis to identify defective viral genomes (DVGs).

[0205] FIG. 62: Deep sequencing map of SARS-CoV-2 DVGs. 3 DVGs were chosen according to their abundance, maintenance in the cell culture upon passage, and size. These 3 DVGs were isolated and sequenced. SARS-CoV-2 DVGs 1, 2 and 3 have the nucleotide sequence of SEQ ID NO: 111, SEQ ID NO: 112 and SEQ ID NO: 113. One of these SARS-CoV-2 DVG was selected (SARS-CoV-2 DVG_2 having the nucleotide sequence of SEQ ID NO/ 112) for further analysis.

[0206] FIG. 63: competition assay in Vero E6 cells and in A549-Ace2 cells (Homo sapiens, epithelial, lung carcinoma) . SARS-CoV-2 DVG_2 was cloned in a vector under the control of a T7 promotor. RNA corresponding to the SARS-CoV-2 DVG_2 clone was synthetized following the procedure indicated for the mMESSAGE mMACHINE T7 Transcription Kit (Thermofisher). RNA of the SARS-CoV-2 DVG_2 clone was transfected into Vero E6 cells or A549-Ace2 cells 4 hours either before or after infection of the cells with wilt type SARS-CoV-2 virus. As a control, a small RNA of the same size as the RNA of the SARS-CoV-2 DVG_2 clone was transfected in the same conditions. Results were obtained by plaque assay. As illustrated on FIG. 63, the transfection of the RNA control does not impact SARS-CoV-2 replication capability, as compared to untreated cells, both in Vero E6 cells and in A549-Ace2 cells (see the two columns on the left of each graph of FIG. 63). The transfection of the RNA of the SARS-CoV-2 DVG_2 clone does not have an impact on the replication of SARS-CoV-2 virus in Vero E6 cells. On A549-Ace2 cells, the replication capability of SARS-CoV-2 virus is impacted by the transfection of the RNA of the SARS-CoV-2 DVG_2 clone, in particular when 100 ng of RNA are transfected within the cells. A reduction of 2.5 log of SARS-CoV-2 titers was observed by post-treating A549-Ace2 cells with 10 ng of the RNA of the SARS-CoV-2 DVG_2 clone. A reduction of 2.5 log of SARS-CoV-2 titers was observed by pre-treating or post-treating A549-Ace2 cells with 100 ng of the RNA of the SARS-CoV-2 DVG_2 clone.

[0207] SARS-CoV-2 sequences are selected from the group consisting of: SEQ ID NO:111 (SARS-CoV-2 DVG_1), SEQ ID NO: 112 (SARS-CoV-2 DVG_2) and SEQ ID NO: 113 (SARS-CoV-2 DVG_3).

### REFERENCES

[0208] 1. Chretien, J.-P. et al. DROUGHT-ASSOCIATED CHIKUNGUNYA EMERGENCE ALONG COASTAL EAST AFRICA. 3.

[0209] 2. Vignuzzi, M. & Higgs, S. The Bridges and Blockades to Evolutionary Convergence on the Road to Predicting Chikungunya Virus Evolution. Annu. Rev. Virol. 4, 181-200 (2017).

[0210] 3. Levi, L. I. & Vignuzzi, M. Arthritogenic Alphaviruses: A Worldwide Emerging Threat? Microorganisms 7, 133 (2019).

[0211] 4. Von Magnus, P. Incomplete forms of influenza virus. Advances in virus research (1954).

[0212] 5. Rezelj, V. V., Levi, L. I. & Vignuzzi, M. The defective component of viral populations. Curr. Opin. Virol. 33, 74-80 (2018).

[0213] 6. Vignuzzi, M. & López, C. B. Defective viral genomes are key drivers of the virus-host interaction. Nat. Microbiol. 1 (2019) doi:10.1038/s41564-019-0465-y.

[0214] 7. Tapia, K. et al. Defective viral genomes arising in vivo provide critical danger signals for the triggering of lung antiviral immunity. PLoS Pathog. 9, e1003703 (2013).

[0215] 8. Shirogane, Y. et al. Experimental and mathematical insights on the competition between poliovirus and a defective interfering genome. bioRxiv 519751 (2019) doi:10.1101/519751.

[0216] 9. Poirier, E. Z. et al. Dicer-2-Dependent Generation of Viral DNA from Defective Genomes of RNA Viruses Modulates Antiviral Immunity in Insects. Cell Host Microbe 23, 353-365.e8 (2018).

[0217] 10. Sun, Y. et al. Immunostimulatory Defective Viral Genomes from Respiratory Syncytial Virus Promote a Strong Innate Antiviral Response during Infection in Mice and Humans. PLOS Pathog. 11, e1005122 (2015).

[0218] 11. Mura, M. et al. Nonencapsidated 5′ Copy-Back Defective Interfering Genomes Produced by Recombinant Measles Viruses Are Recognized by RIG-I and LGP2 but Not MDA5. J. Virol. 91, (2017).

[0219] 12. Li, D. et al. Defective interfering viral particles in acute dengue infections. PloS One 6, e19447 (2011).

[0220] 13. Vasilijevic, J. et al. Reduced accumulation of defective viral genomes contributes to severe outcome in influenza virus infected patients. PLOS Pathog. 13, e1006650 (2017).

[0221] 14. Dimmock, N. J., Rainsford, E. W., Scott, P. D. & Marriott, A. C. Influenza Virus Protecting RNA: an Effective Prophylactic and Therapeutic Antiviral. J. Virol. 82, 8570-8578 (2008).

[0222] 15. Dimmock, N. J. & Easton, A. J. Defective Interfering Influenza Virus RNAs: Time To Reevaluate Their Clinical Potential as Broad-Spectrum Antivirals? J. Virol. 88, 5217-5227 (2014).

[0223] 16. Poirier, E. Z. et al. Low-Fidelity Polymerases of Alphaviruses Recombine at Higher Rates To Overproduce Defective Interfering Particles. J. Virol. 90, 2446-2454 (2015).

[0224] 17. Coffey, L. L. & Vignuzzi, M. Host alternation of chikungunya virus increases fitness while restricting population diversity and adaptability to novel selective pressures. J. Virol. 85, 1025-1035 (2011).

[0225] 18. Stapleford, K. A. et al. Whole-Genome Sequencing Analysis from the Chikungunya Virus Caribbean Outbreak Reveals Novel Evolutionary Genomic Elements. PLoS Negl. Trop. Dis. 10, e0004402 (2016).

[0226] 19. Garcia-Nafria, J., Watson, J. F. & Greger, I. H. IVA cloning: A single-tube universal cloning system exploiting bacterial In Vivo Assembly. Sci. Rep. 6, (2016).

[0227] 20. Zhang, X. et al. Differences in genome characters and cell tropisms between two chikungunya isolates of Asian lineage and Indian Ocean lineage. Virol. J. 15, 130 (2018).

[0228] 21. Rezelj, V. V., Levi, L. I. & Vignuzzi, M. The defective component of viral populations. Curr. Opin. Virol. 33, 74-80 (2018).

[0229] 22. Dimmock, N. J. In vivo antiviral activity: defective interfering virus protects better against virulent Influenza A virus than avirulent virus. J. Gen. Virol. 87, 1259-1265 (2006).

[0230] 23. Mann, A. et al. Interfering vaccine (defective interfering influenza A virus) protects ferrets from influenza, and allows them to develop solid immunity to reinfection. Vaccine 24, 4290-4296 (2006).

[0231] 24. Mercado-López, X. et al. Highly immunostimulatory RNA derived from a Sendai virus defective viral genome. Vaccine 31, 5713-5721 (2013).

[0232] 25. Fisher, D. G., Coppock, G. M. & López, C. B. Virus-derived immunostimulatory RNA induces type I IFN-dependent antibodies and T-cell responses during vaccination. Vaccine 36, 4039-4045 (2018).

[0233] 26. Martinez-Gil, L. et al. A Sendai virus-derived RNA agonist of RIG-I as a virus vaccine adjuvant. J. Virol. 87, 1290-1300 (2013).

[0234] 27. Easton, A. J. et al. A novel broad-spectrum treatment for respiratory virus infections: influenza-based defective interfering virus provides protection against pneumovirus infection in vivo. Vaccine 29, 2777-2784 (2011).

[0235] 28. Fuller, F. J. & Marcus, P. I. Interferon induction by viruses. IV. Sindbis virus: early passage defective-interfering particles induce interferon. J. Gen. Virol. 48, 63-73 (1980).

[0236] 29. Johnston, M. D. The characteristics required for a Sendai virus preparation to induce high levels of interferon in human lymphoblastoid cells. J. Gen. Virol. 56, 175-184 (1981).

[0237] 30. Marcus, P. I. & Sekellick, M. J. Defective interfering particles with covalently linked [+/-]RNA induce interferon. Nature 266, 815-819 (1977).

[0238] 31. van den Hoogen, B. G. et al. Excessive production and extreme editing of human metapneumovirus defective interfering RNA is associated with type IIFN induction. J. Gen. Virol. 95, 1625-1633 (2014).

[0239] 32. Yount, J. S., Gitlin, L., Moran, T. M. & Lopez, C. B. MDA5 Participates in the Detection of Paramyxovirus Infection and Is Essential for the Early Activation of Dendritic Cells in Response to Sendai Virus Defective Interfering Particles. J. Immunol. 180, 4910-4918 (2008).

[0240] 33. Shivakoti, R., Siwek, M., Hauer, D., Schultz, K. L. W. & Griffin, D. E. Induction of dendritic cell production of type I and type III interferons by wild-type and vaccine strains of measles virus: role of defective interfering RNAs. J. Virol. 87, 7816-7827 (2013).

[0241] 34. Meng, B. et al. Unexpected complexity in the interference activity of a cloned influenza defective interfering RNA. Virol. J. 14, 138 (2017).

[0242] 35. Matusali, G. et al. Tropism of the Chikungunya Virus. Viruses 11, (2019).

[0243] 36. Forrester, N., Coffey, L. & Weaver, S. Arboviral Bottlenecks and Challenges to Maintaining Diversity and Fitness during Mosquito Transmission. Viruses 6, 3991-4004 (2014).

[0244] 37. Forrester, N. L., Guerbois, M., Seymour, R. L., Spratt, H. & Weaver, S. C. Vector-Borne Transmission Imposes a Severe Bottleneck on an RNA Virus Population. PLoS Pathog. 8, e1002897 (2012).

[0245] 38. Stapleford, K. A. et al. Emergence and transmission of arbovirus evolutionary intermediates with epidemic potential. Cell Host Microbe 15, 706-716 (2014).

[0246] 39. Weger-Lucarelli, J. et al. Using barcoded Zika virus to assess virus population structure in vitro and in Aedes aegypti mosquitoes. Virology 521, 138-148 (2018).

[0247] 40. Cuevas, J. M., Duran-Moreno, M. & Sanjuan, R. Multi-virion infectious units arise from free viral particles in an enveloped virus. Nat. Microbiol. 2, 17078 (2017).

[0248] 41. Sanjuan, R. Collective Infectious Units in Viruses. Trends Microbiol. 25, 402-412 (2017).

[0249] 42. Leeks, A., Sanjuan, R. & West, S. A. The evolution of collective infectious units in viruses. Virus Res. 265, 94-101 (2019).

[0250] 43. Acosta-Ampudia, Y. et al. Mayaro: an emerging viral threat? Emerg. Microbes Infect. 7, 163 (2018).

[0251] 44. Rezza, G., Chen, R. & Weaver, S. C. O’nyong-nyong fever: a neglected mosquito-borne viral disease. Pathog. Glob. Health 111, 271-275 (2017).

[0252] 45. Mackay, I. M. & Arden, K. E. Mayaro virus: a forest virus primed for a trip to the city? Microbes Infect.0 18, 724-734 (2016).

[0253] 46. Esposito, D. L. A. & Fonseca, B. A. L. da. Will Mayaro virus be responsible for the next outbreak of an arthropod-borne virus in Brazil? Braz. J. Infect. Dis. Off. Publ. Braz. Soc. Infect. Dis. 21, 540-544 (2017).

[0254] 47. Liu, X., Tharmarajah, K. & Taylor, A. Ross River virus disease clinical presentation, pathogenesis and current therapeutic strategies. Microbes Infect. 19, 496-504 (2017).

[0255] 48. Pilot, R. et al. A Review on Surface-Enhanced Raman Scattering. Biosensors 9, 57 (2019).

[0256] 49. Erasmus, J. H. et al. A Nanostructured Lipid Carrier for Delivery of a Replicating Viral RNA Provides Single, Low-Dose Protection against Zika. Mol. Ther. (2018) doi:10.1016/j.ymthe.2018.07.010.

[0257] 50. Couderc, T. et al. Prophylaxis and therapy for Chikungunya virus infection. J. Infect. Dis. 200, 516-523 (2009).

[0258] 51. Haese, N. N. et al. Animal Models of Chikungunya Virus Infection and Disease. J. Infect. Dis. 214, S482-S487 (2016).

[0259] 52. Ferguson, N. M. et al. Modeling the impact on virus transmission of Wolbachia-mediated blocking of dengue virus infection of Aedes aegypti. Sci. Transl. Med. 7, 279ra37 (2015).

[0260] 53. Ferguson, N. M. Challenges and opportunities in controlling mosquito-borne infections. Nature 559, 490-497 (2018).

The application's sequence listing, which the Patent Office published only in electronic form, follows.

SEQUENCE LISTING (113 sequences)

SEQ ID NO: 1 - DNA, 7334 bp, Artificial Sequence
  Synthetic sequence
ttaaaacagcctgtgggttgcacccacccacagggcccactgggcgcaagcactctggtaccccggtacctttgtgtgcctgttttatacccccccccccaatgaaacttagaagcagcaaaccacgatcaatagtaggcataacgctccagttatgtcttgatcaagcacttctgtttccccggactgagtatcaatagactgctcgcgcggttgaaggagaaaacgttcgttatccggctagctacttcggaaaacctagtaacaccatgaaagttgcggagagcttcgttcatggggcgctctaatacggacatggtgtgaagagtctactgagctagttagtagtcctccggcccctgaatgcggctaatcccaactgcggagcacacgcccacaagccagcgggtagtgtgtcgtaacgggtaactctgcagcggaaccgactactttgggtgtccgtgtttccttttatctttatattggctgcttatggtgacaattaaagaattgttaccatatagctattggattggccatccggtgtgcaacagagcaattatttaccaatttgttggttttgtaccattaaccttgaattctgtgaccacccttaattatattttgacccttaacgcagctaaacatgggttcgcaagtgtctacacagcgctccggttctcatgaaaactcaaactcagccactgagggttctaccataaactacaccaccatcaattactacaaagactcttatgctgccacagcaggcaaacagagtctcaagcaggatccagacaagtttgcaaatcctgttaaagacatcttcactgaaatggcagcgccattgaagtccccatccgctgaggcatgtggatacagtgatcgagtggcacaattaactattggcaactccaccatcaccacgcaagaagcggctaacatcatagtcggttatggtgagtggccttcttactgctcagattctgacgctacagcagtggataaaccaacgcgcccggatgtttcagtgaataggttttacacgttagacactaaattatgggagaaatcgtccaagggatggtactggaagttcccggatgtgttaactgaaactggggtttttgggcaaaatgcacaattccactacctctaccgatcagggttctgcatccacgtgcagtgtaatgctagtaaattccaccaaggagcactcctagtcgctgtcctaccagagtatgtcattgggacagtagcaggcggcacagggacggaagatacccaccccccttataagcagacccaacccggtgccgatggcttcgagctgcagcacccgtacgtgcttgacgctggcatcccaatatcacagttaacagtgtgcccacaccagtggattaatttgaggaccaacaattgtgctacaataatagtgccatacattaacgcactgccttttgattctgccttgaaccattgcaactttggcctgctagttgtgcctattagtccactagactacgaccaaggagcgacgccagtaatccctataactatcacattggccccaatgtgttctgagttcgcaggtcttaggcaggcagtcacgcaagggttccctaccgagctaaaacctggcacaaatcaattcttaaccaccgatgatggtgtctcagcacctattctaccaaacttccaccccaccccgtgtatccacatacctggtgaagtgaggaatttgctagagttatgccaggtggaaaccattctggaggttaataatgtgcccacgaatgccactagcttgatggagagactgcgcttcccggtctcagcacaagcagggaaaggtgaactgtgtgcggtgtttagagccgatcctgggcgaaacggaccatggcaatccaccttactgggtcagttgtgcgggtactacacccaatggtcaggatcattggaggtcaccttcatgtttactggatccttcatggctaccggcaagatgctcatagcctatacaccgccaggaggtcctctgcccaaggaccgggcgaccgccatgttgggcacgcacgtcatctgggattttgggctgcaatcgtctgttacccttgtaataccatggatcagcaacactcattatagagcacatgcccgagatggagtgtttgactactacaccacagggttggtcagtatatggtatcagacaaattacgtggttccaattggtgcgcccaacacagcctatataatagcactagcggcagcccaaaagaacttcactatgaaattgtgcaaggatgctagtgatatcttgcagacgggcaccatccagggagatagggtggcagatgtaattgaaagctccataggagatagcgtgagcagagccctcactcacgctctaccagcacccacaggtcagaacacacaggtgagcagtcatcgactggatacgggcaaggttccagcactccaagctgctgaaattggagcatcatcaaatgctagtgacgagagtatgattgagacacgctgtgtcctcaactcgcacagtacagcagagaccactcttgatagtttcttcagcagggcgggattagttggagagatagatctccctcttgagggcacaactaacccaaatggttatgccaactgggacatagatataacaggttacgcgcaaatgcgtagaaaggtagagctcttcacctacatgcgctttgatgcagagttcacttttgttgcgtgtacacctaccggggaagttgttccacaactgctccaatatatgtttgtgccacctggagccccaaagccagattctagggaatcccttgcatggcaaaccgccactaacccctcagtttttgtcaagctgtcagaccctccagcacaggtttcagtgccattcatgtcacctgcgagtgcttatcaatggttttatgacggatatcccacgttcggagaacacaaacaggagaaagatcttgaatatggggcatgtcctaataacatgatgggcacgttctcagtgcggactgtagggtcctccaagtccaagtaccctctagtgattaggatttacatgagaatgaagcacgtcagggcgtggatacctcgcccgatgcgtaaccagaactacctattcaaagccaatccaaattatgctggcaactccgttaagccaactggtgccagtcgcacagcgatcaccactcttgggaaatttggacaacagtctggggctatttatgtgggcaactttagggtggtcaaccgacatcttgccactcacaatgattgggcaaatcttgtttgggaagacagctctcgcgacttgctcgtgtcatccactaccgcccaaggttgcgacacgattgcccgctgcgattgccagacaggggtgtactactgtaactcgatgagaaaacactacccagttagtttttcaaaacccagcctgatctatgtagaggctagcgagtattacccagccaggtaccaatcacatctcatgctcgcacagggtcactcagaacctggtgattgcggtggtatccttaggtgccaacatggcgtcgtcggcatagtgtccactggtggtaatgggcttgttggctttgcagacgtcagagacctcttgtggttagatgaagaagccatggaacagggcgtgtccgactacatcaagggtctcggggatgcttttggaacaggctttactgacgcagtctcaagggaggttgaagctctcaagaactatctcatagggtctgaaggagcagttgagaaaattttgaaaaatctaattaaactaatctctgcactggtgattgtgatcagaagtgattatgatatggttaccctcactgcgaccttggcgctgataggttgtcatggcagtccgtgggcttggatcaaagccaaaacagcctccatcttaggtatccctattgctcaaaagcagagcgcttcctggctcaagaagttcaatgatatggccaacgccgctaaggggttagagtgggtttccaacaagatcagcaaatttattgattggcttaaggagaagatagtaccagcagctagggagaaggttgaattcctaaataacttgaaacagctgccactgctagagaatcagatctcaaacttggaacaatctgctgcctcacaagaggaccttgaaatcatgtttgggaatgtatcgtacctagctcacttctgccgcaagttccaaccgctatacgccacggaagctaggagagtctatgccctggagaagaggatgaataactatatgcagttcaagagcaaacaccgaattgaacctgtatgtctcatcattaggggctcaccaggcactgggaagtctctagccactggtattattgctcgagcaatcgctgataagtaccactccagcgtgtactcgctcccaccagacccagatcattttgacggttacaagcaacaggtggttaccgtgatggatgatctgtgccaaaaccccgacggaaaggatatgtctttattctgtcaaatggtatccaccgtagacttcattccaccaatggcttccctcgaggagaagggagtttccttcacctctaagtttgtcatcgcatccactaatgccagtaatatcatagtaccaacagtgtctgattccgacgctattcgccgcaggttctacatggactgtgacattgaagtgacagactcatacaaaacagatctaggtagactggatgcagggcgagccgctaaactgtgctctgagaacaacactgcaaatttcaaacgttgtagcccgttagtgtgcgggaaagctatccaacttagagatagaaagtctaaagtcagatacagtgtggatacggtggtttcagaacttattagggaatacagcaataggtccgctattggcaacacaatcgaggctcttttccaaggtccacccaagttcaggccaattaggattagccttgaagaaaaaccagccccagacgctattagcgatctccttgctagcgtagatagtgaagaagtgcgccagtactgcagggatcaaggctggattattcctgaagttcccaccaatgtagagcggcaccttaatagagcggtgcttgtcatgcaatccatcgccacagtagtggcagttgtctcgttggtgtatgtcatctacaagctctttgcagggttccagggtgcgtattctggtgctcctaagcaagtgcttaagaaacctgcccttcgcacagcaacagtacagggcccgagccttgactttgctctctccctactgagaaggaacatcagacaagttcaaacagaccaggggcatttcaccatgttgggtgttagggatcgcttagcagtccttccacgtcactcacaacctggcaaaactatttgggttgaacacaaactcgtgaacgtccttgatgcagttgaactggtggatgagcaaggagtcaacctggaattgaccctcattactcttgacaccaacgagaagtttagggatattaccaagttcatcccggaaaatattagcactgctagtgatgccaccctagtgatcaacacggagcatatgccatcaatgtttgtcccggtgggtgacgttgtgcagtatggctttttgaatctcagtggtaagcctacccatcgcaccatgatgtacaactttcctactaaagcagggcagtgtggaggagtagtgacatctgttgggaaggttgtcggtattcacattggtggcaatggcagacagggtttttgcgcaggcctcaaaaggagttactttgctagtgaacaaggagagatccaatgggttaagcccaacaaagaaactggaagactcaacattaatggaccaacccgcaccaaattagaacctagtgtattccatgacatcttcgagggaaataaagagccagctgtcttgcacagtaaagacccccgacttgaagtagattttgaacaggccctgttctctaagtatgtgggaaacacactacatgagcctgacgagtacatcaaagaggcggctcttcattacgcgaaccaattgaagcaattagaaattaatacctctcaaatgagcatggaagaggcctgctacggtactgagaatcttgaggctattgatcttcacactagtgcaggatacccttatagtgccttggggataaagaaaagagacatcttagaccctaccaccagggacgtgagtaaaatgaagttctacatggacaagtatggtcttgatcttccttactccacttatgtcaaggacgagctacgctcgattgataaaattaagaaagggaagtcccgtctgatcgaggctagtagtctaaatgattcagtgtacctcagaatggctttcggacatttgtatgaggctttccacgcaaatcctgggacaataactggatcagccgtggggtgtaaccctgacacattctggagcaagctgccaattttgctccctggttcactctttgctttcgactactcaggttatgatgccagccttagccctgtctggttcagagcattagaattagttctcagggagatagggtatagtgaagaggcggtctcactcattgagggaatcaaccacacacaccatgtgtatcgtaataagacctattgtgtgcttggtgggatgccctcaggttgttcgggaacatccattttcaactcaatgatcaacaacattatcatcagagcactgctcataaaaacatttaagggcattgacttggatgaactcaacatggtcgcttatggagacgatgtgctcgctagctatcccttcccaattgattgcttggaactagcaaagactggtaaggagtatggtttgaccatgactcctgctgataaatctccttgcttcaatgaggttaattggggtaatgcgaccttccttaaaaggggctttttgcccgatgaacagtttccgttcttgattcaccccactatgccaatgagggagatccatgagtccattcgatggaccaaggacgcccgaaacactcaagatcatgtgcggtccttgtgcctcctagcatggcataatggtaaacaagaatatgagaagtttgtgagcacaattaggtctgttccagtgggaagagcgttggctattccaaattatgaaaaccttagacgcaattggctcgagttattttagaggttatacacacctcaaccccaccagaaatctggtcgtgaatgtgactggtgggggtaaatttgttataaccagaatagcaaaaaaaaaaaaaaaaaaaaaaaaa

SEQ ID NO: 2 - DNA, 7321 bp, Artificial Sequence
  Synthetic sequence
ttaaaacagcctgtgggttgcacccacccacagggcccactgggcgcaagcactctggtaccccggtacctttgtgtgcctgttttatacccccccccccaatgaaacttagaagcagcaaaccacgatcaatagtaggcataacgctccagttatgtcttgatcaagcacttctgtttccccggactgagtatcaatagactgctcgcgcggttgaaggagaaaacgttcgttatccggctagctacttcggaaaacctagtaacaccatgaaagttgcggagagcttcgttcatacggacatggtgtgaagagtctactgagctagttagtagtcctccggcccctgaatgcggctaatcccaactgcggagcacacgcccacaagccagcgggtagtgtgtcgtaacgggtaactctgcagcggaaccgactactttgggtgtccgtgtttccttttatctttatattggctgcttatggtgacaattaaagaattgttaccatatagctattggattggccatccggtgtgcaacagagcaattatttaccaatttgttggttttgtaccattaaccttgaattctgtgaccacccttaattatattttgacccttaacgcagctaaacatgggttcgcaagtgtctacacagcgctccggttctcatgaaaactcaaactcagccactgagggttctaccataaactacaccaccatcaattactacaaagactcttatgctgccacagcaggcaaacagagtctcaagcaggatccagacaagtttgcaaatcctgttaaagacatcttcactgaaatggcagcgccattgaagtccccatccgctgaggcatgtggatacagtgatcgagtggcacaattaactattggcaactccaccatcaccacgcaagaagcggctaacatcatagtcggttatggtgagtggccttcttactgctcagattctgacgctacagcagtggataaaccaacgcgcccggatgtttcagtgaataggttttacacgttagacactaaattatgggagaaatcgtccaagggatggtactggaagttcccggatgtgttaactgaaactggggtttttgggcaaaatgcacaattccactacctctaccgatcagggttctgcatccacgtgcagtgtaatgctagtaaattccaccaaggagcactcctagtcgctgtcctaccagagtatgtcattgggacagtagcaggcggcacagggacggaagatacccaccccccttataagcagacccaacccggtgccgatggcttcgagctgcagcacccgtacgtgcttgacgctggcatcccaatatcacagttaacagtgtgcccacaccagtggattaatttgaggaccaacaattgtgctacaataatagtgccatacattaacgcactgccttttgattctgccttgaaccattgcaactttggcctgctagttgtgcctattagtccactagactacgaccaaggagcgacgccagtaatccctataactatcacattggccccaatgtgttctgagttcgcaggtcttaggcaggcagtcacgcaagggttccctaccgagctaaaacctggcacaaatcaattcttaaccaccgatgatggtgtctcagcacctattctaccaaacttccaccccaccccgtgtatccacatacctggtgaagtgaggaatttgctagagttatgccaggtggaaaccattctggaggttaataatgtgcccacgaatgccactagcttgatggagagactgcgcttcccggtctcagcacaagcagggaaaggtgaactgtgtgcggtgtttagagccgatcctgggcgaaacggaccatggcaatccaccttactgggtcagttgtgcgggtactacacccaatggtcaggatcattggaggtcaccttcatgtttactggatccttcatggctaccggcaagatgctcatagcctatacaccgccaggaggtcctctgcccaaggaccgggcgaccgccatgttgggcacgcacgtcatctgggattttgggctgcaatcgtctgttacccttgtaataccatggatcagcaacactcattatagagcacatgcccgagatggagtgtttgactactacaccacagggttggtcagtatatggtatcagacaaattacgtggttccaattggtgcgcccaacacagcctatataatagcactagcggcagcccaaaagaacttcactatgaaattgtgcaaggatgctagtgatatcttgcagacgggcaccatccagggagatagggtggcagatgtaattgaaagctccataggagatagcgtgagcagagccctcactcacgctctaccagcacccacaggtcagaacacacaggtgagcagtcatcgactggatacgggcaaggttccagcactccaagctgctgaaattggagcatcatcaaatgctagtgacgagagtatgattgagacacgctgtgtcctcaactcgcacagtacagcagagaccactcttgatagtttcttcagcagggcgggattagttggagagatagatctccctcttgagggcacaactaacccaaatggttatgccaactgggacatagatataacaggttacgcgcaaatgcgtagaaaggtagagctcttcacctacatgcgctttgatgcagagttcacttttgttgcgtgtacacctaccggggaagttgttccacaactgctccaatatatgtttgtgccacctggagccccaaagccagattctagggaatcccttgcatggcaaaccgccactaacccctcagtttttgtcaagctgtcagaccctccagcacaggtttcagtgccattcatgtcacctgcgagtgcttatcaatggttttatgacggatatcccacgttcggagaacacaaacaggagaaagatcttgaatatggggcatgtcctaataacatgatgggcacgttctcagtgcggactgtagggtcctccaagtccaagtaccctctagtgattaggatttacatgagaatgaagcacgtcagggcgtggatacctcgcccgatgcgtaaccagaactacctattcaaagccaatccaaattatgctggcaactccgttaagccaactggtgccagtcgcacagcgatcaccactcttgggaaatttggacaacagtctggggctatttatgtgggcaactttagggtggtcaaccgacatcttgccactcacaatgattgggcaaatcttgtttgggaagacagctctcgcgacttgctcgtgtcatccactaccgcccaaggttgcgacacgattgcccgctgcgattgccagacaggggtgtactactgtaactcgatgagaaaacactacccagttagtttttcaaaacccagcctgatctatgtagaggctagcgagtattacccagccaggtaccaatcacatctcatgctcgcacagggtcactcagaacctggtgattgcggtggtatccttaggtgccaacatggcgtcgtcggcatagtgtccactggtggtaatgggcttgttggctttgcagacgtcagagacctcttgtggttagatgaagaagccatggaacagggcgtgtccgactacatcaagggtctcggggatgcttttggaacaggctttactgacgcagtctcaagggaggttgaagctctcaagaactatctcatagggtctgaaggagcagttgagaaaattttgaaaaatctaattaaactaatctctgcactggtgattgtgatcagaagtgattatgatatggttaccctcactgcgaccttggcgctgataggttgtcatggcagtccgtgggcttggatcaaagccaaaacagcctccatcttaggtatccctattgctcaaaagcagagcgcttcctggctcaagaagttcaatgatatggccaacgccgctaaggggttagagtgggtttccaacaagatcagcaaatttattgattggcttaaggagaagatagtaccagcagctagggagaaggttgaattcctaaataacttgaaacagctgccactgctagagaatcagatctcaaacttggaacaatctgctgcctcacaagaggaccttgaaatcatgtttgggaatgtatcgtacctagctcacttctgccgcaagttccaaccgctatacgccacggaagctaggagagtctatgccctggagaagaggatgaataactatatgcagttcaagagcaaacaccgaattgaacctgtatgtctcatcattaggggctcaccaggcactgggaagtctctagccactggtattattgctcgagcaatcgctgataagtaccactccagcgtgtactcgctcccaccagacccagatcattttgacggttacaagcaacaggtggttaccgtgatggatgatctgtgccaaaaccccgacggaaaggatatgtctttattctgtcaaatggtatccaccgtagacttcattccaccaatggcttccctcgaggagaagggagtttccttcacctctaagtttgtcatcgcatccactaatgccagtaatatcatagtaccaacagtgtctgattccgacgctattcgccgcaggttctacatggactgtgacattgaagtgacagactcatacaaaacagatctaggtagactggatgcagggcgagccgctaaactgtgctctgagaacaacactgcaaatttcaaacgttgtagcccgttagtgtgcgggaaagctatccaacttagagatagaaagtctaaagtcagatacagtgtggatacggtggtttcagaacttattagggaatacagcaataggtccgctattggcaacacaatcgaggctcttttccaaggtccacccaagttcaggccaattaggattagccttgaagaaaaaccagccccagacgctattagcgatctccttgctagcgtagatagtgaagaagtgcgccagtactgcagggatcaaggctggattattcctgaagttcccaccaatgtagagcggcaccttaatagagcggtgcttgtcatgcaatccatcgccacagtagtggcagttgtctcgttggtgtatgtcatctacaagctctttgcagggttccagggtgcgtattctggtgctcctaagcaagtgcttaagaaacctgcccttcgcacagcaacagtacagggcccgagccttgactttgctctctccctactgagaaggaacatcagacaagttcaaacagaccaggggcatttcaccatgttgggtgttagggatcgcttagcagtccttccacgtcactcacaacctggcaaaactatttgggttgaacacaaactcgtgaacgtccttgatgcagttgaactggtggatgagcaaggagtcaacctggaattgaccctcattactcttgacaccaacgagaagtttagggatattaccaagttcatcccggaaaatattagcactgctagtgatgccaccctagtgatcaacacggagcatatgccatcaatgtttgtcccggtgggtgacgttgtgcagtatggctttttgaatctcagtggtaagcctacccatcgcaccatgatgtacaactttcctactaaagcagggcagtgtggaggagtagtgacatctgttgggaaggttgtcggtattcacattggtggcaatggcagacagggtttttgcgcaggcctcaaaaggagttactttgctagtgaacaaggagagatccaatgggttaagcccaacaaagaaactggaagactcaacattaatggaccaacccgcaccaaattagaacctagtgtattccatgacatcttcgagggaaataaagagccagctgtcttgcacagtaaagacccccgacttgaagtagattttgaacaggccctgttctctaagtatgtgggaaacacactacatgagcctgacgagtacatcaaagaggcggctcttcattacgcgaaccaattgaagcaattagaaattaatacctctcaaatgagcatggaagaggcctgctacggtactgagaatcttgaggctattgatcttcacactagtgcaggatacccttatagtgccttggggataaagaaaagagacatcttagaccctaccaccagggacgtgagtaaaatgaagttctacatggacaagtatggtcttgatcttccttactccacttatgtcaaggacgagctacgctcgattgataaaattaagaaagggaagtcccgtctgatcgaggctagtagtctaaatgattcagtgtacctcagaatggctttcggacatttgtatgaggctttccacgcaaatcctgggacaataactggatcagccgtggggtgtaaccctgacacattctggagcaagctgccaattttgctccctggttcactctttgctttcgactactcaggttatgatgccagccttagccctgtctggttcagagcattagaattagttctcagggagatagggtatagtgaagaggcggtctcactcattgagggaatcaaccacacacaccatgtgtatcgtaataagacctattgtgtgcttggtgggatgccctcaggttgttcgggaacatccattttcaactcaatgatcaacaacattatcatcagagcactgctcataaaaacatttaagggcattgacttggatgaactcaacatggtcgcttatggagacgatgtgctcgctagctatcccttcccaattgattgcttggaactagcaaagactggtaaggagtatggtttgaccatgactcctgctgataaatctccttgcttcaatgaggttaattggggtaatgcgaccttccttaaaaggggctttttgcccgatgaacagtttccgttcttgattcaccccactatgccaatgagggagatccatgagtccattcgatggaccaaggacgcccgaaacactcaagatcatgtgcggtccttgtgcctcctagcatggcataatggtaaacaagaatatgagaagtttgtgagcacaattaggtctgttccagtgggaagagcgttggctattccaaattatgaaaaccttagacgcaattggctcgagttattttagaggttatacacacctcaaccccaccagaaatctggtcgtgaatgtgactggtgggggtaaatttgttataaccagaatagcaaaaaaaaaaaaaaaaaaaaaaaaa

SEQ ID NO: 3 - DNA, 6282 bp, Artificial Sequence
  Synthetic sequence
ttaaaacagcctgtgggttgcacccacccacagggcccactgggcgcaagcactctggtaccccggtacctttgtgtgcctgttttatacccccccccccaatgaaacttagaagcagcaaaccacgatcaatagtaggcataacgctccagttatgtcttgatcaagcacttctgtttccccggactgagtatcaatagactgctcgcgcggttgaaggagaaaacgttcgttatccggctagctacttcggaaaacctagtaacaccatgaaagttgcggagagcttcgttcagcactcccccagtgtagatcaggtcgatgagtcaccgcattccccacgggcgaccgtggcggtggctgcgttggcggcctgcccatggggtaacccatggggcgctctaatacggacatggtgtgaagagtctactgagctagttagtagtcctccggcccctgaatgcggctaatcccaactgcggagcacacgcccacaagccagcgggtagtgtgtcgtaacgggtaactctgcagcggaaccgactactttgggtgtccgtgtttccttttatctttatattggctgcttatggtgacaattaaagaattgttaccatatagctattggattggccatccggtgtgcaacagagcaattatttaccaatttgttggttttgtaccattaaccttgaattctgtgaccacccttaattatattttgacccttaacgcagctaaacatgggttcgcaagtgtctacacagcgctccggttctcatgaaaactcaaactcagccactgagggttctaccataaactacaccaccatcaattactacaaagactcttatgctgccacagcaggcaaacagagtctcaagcaggatccagacaagtttgcaaatcctgttaaagacatcttcactgaaatggcagcgccattgaagtccccatccgctgaggcatgtggatacagtgatcgagtggcacaattaactattggcaactccaccatcaccacgcaagaagcggctaacatcatagtcggttatggtgagtggccttcttactgctcagattctgacgctacagcagtggataaaccaacgcgcccggatgtttcagtgaataggttttacacgttagacactaaattatgggagaaatcgtccaagggatggtactggaagttcccggatgtgttaactgaaactggggtttttgggcaaaatgcacaattccactacctctaccgatcagggttctgcatccacgtgcagtgtaatgctagtaaattccaccaaggagcactcctagtcgctgtcctaccagagtatgtcattgggacagtagcaggcggcacagggacggaagatacccaccccccttataagcagacccaacccggtgccgatggcttcgagctgcagcacccgtacgtgcttgacgctggcatcccaatatcacagttaacagtgtgcccacaccagtggattaatttgaggaccaacaattgtgctacaataatagtgccatacattaacgcactgccttttgattctgccttgaaccattgcaactttggcctgctagttgtgcctattagtccactagactacgaccaaggagcgacgccagtaatccctataactatcacattggccccaatgtgttctgagttcgcaggtcttaggcaggcagtcacgcaagggttccctaccgagctaaaacctggcacaaatcatatgtttgtgccacctggagccccaaagccagattctagggaatcccttgcatggcaaaccgccactaacccctcagtttttgtcaagctgtcagaccctccagcacaggtttcagtgccattcatgtcacctgcgagtgcttatcaatggttttatgacggatatcccacgttcggagaacacaaacaggagaaagatcttgaatatggggcatgtcctaataacatgatgggcacgttctcagtgcggactgtagggtcctccaagtccaagtaccctctagtgattaggatttacatgagaatgaagcacgtcagggcgtggatacctcgcccgatgcgtaaccagaactacctattcaaagccaatccaaattatgctggcaactccgttaagccaactggtgccagtcgcacagcgatcaccactcttgggaaatttggacaacagtctggggctatttatgtgggcaactttagggtggtcaaccgacatcttgccactcacaatgattgggcaaatcttgtttgggaagacagctctcgcgacttgctcgtgtcatccactaccgcccaaggttgcgacacgattgcccgctgcgattgccagacaggggtgtactactgtaactcgatgagaaaacactacccagttagtttttcaaaacccagcctgatctatgtagaggctagcgagtattacccagccaggtaccaatcacatctcatgctcgcacagggtcactcagaacctggtgattgcggtggtatccttaggtgccaacatggcgtcgtcggcatagtgtccactggtggtaatgggcttgttggctttgcagacgtcagagacctcttgtggttagatgaagaagccatggaacagggcgtgtccgactacatcaagggtctcggggatgcttttggaacaggctttactgacgcagtctcaagggaggttgaagctctcaagaactatctcatagggtctgaaggagcagttgagaaaattttgaaaaatctaattaaactaatctctgcactggtgattgtgatcagaagtgattatgatatggttaccctcactgcgaccttggcgctgataggttgtcatggcagtccgtgggcttggatcaaagccaaaacagcctccatcttaggtatccctattgctcaaaagcagagcgcttcctggctcaagaagttcaatgatatggccaacgccgctaaggggttagagtgggtttccaacaagatcagcaaatttattgattggcttaaggagaagatagtaccagcagctagggagaaggttgaattcctaaataacttgaaacagctgccactgctagagaatcagatctcaaacttggaacaatctgctgcctcacaagaggaccttgaaatcatgtttgggaatgtatcgtacctagctcacttctgccgcaagttccaaccgctatacgccacggaagctaggagagtctatgccctggagaagaggatgaataactatatgcagttcaagagcaaacaccgaattgaacctgtatgtctcatcattaggggctcaccaggcactgggaagtctctagccactggtattattgctcgagcaatcgctgataagtaccactccagcgtgtactcgctcccaccagacccagatcattttgacggttacaagcaacaggtggttaccgtgatggatgatctgtgccaaaaccccgacggaaaggatatgtctttattctgtcaaatggtatccaccgtagacttcattccaccaatggcttccctcgaggagaagggagtttccttcacctctaagtttgtcatcgcatccactaatgccagtaatatcatagtaccaacagtgtctgattccgacgctattcgccgcaggttctacatggactgtgacattgaagtgacagactcatacaaaacagatctaggtagactggatgcagggcgagccgctaaactgtgctctgagaacaacactgcaaatttcaaacgttgtagcccgttagtgtgcgggaaagctatccaacttagagatagaaagtctaaagtcagatacagtgtggatacggtggtttcagaacttattagggaatacagcaataggtccgctattggcaacacaatcgaggctcttttccaaggtccacccaagttcaggccaattaggattagccttgaagaaaaaccagccccagacgctattagcgatctccttgctagcgtagatagtgaagaagtgcgccagtactgcagggatcaaggctggattattcctgaagttcccaccaatgtagagcggcaccttaatagagcggtgcttgtcatgcaatccatcgccacagtagtggcagttgtctcgttggtgtatgtcatctacaagctctttgcagggttccagggtgcgtattctggtgctcctaagcaagtgcttaagaaacctgcccttcgcacagcaacagtacagggcccgagccttgactttgctctctccctactgagaaggaacatcagacaagttcaaacagaccaggggcatttcaccatgttgggtgttagggatcgcttagcagtccttccacgtcactcacaacctggcaaaactatttgggttgaacacaaactcgtgaacgtccttgatgcagttgaactggtggatgagcaaggagtcaacctggaattgaccctcattactcttgacaccaacgagaagtttagggatattaccaagttcatcccggaaaatattagcactgctagtgatgccaccctagtgatcaacacggagcatatgccatcaatgtttgtcccggtgggtgacgttgtgcagtatggctttttgaatctcagtggtaagcctacccatcgcaccatgatgtacaactttcctactaaagcagggcagtgtggaggagtagtgacatctgttgggaaggttgtcggtattcacattggtggcaatggcagacagggtttttgcgcaggcctcaaaaggagttactttgctagtgaacaaggagagatccaatgggttaagcccaacaaagaaactggaagactcaacattaatggaccaacccgcaccaaattagaacctagtgtattccatgacatcttcgagggaaataaagagccagctgtcttgcacagtaaagacccccgacttgaagtagattttgaacaggccctgttctctaagtatgtgggaaacacactacatgagcctgacgagtacatcaaagaggcggctcttcattacgcgaaccaattgaagcaattagaaattaatacctctcaaatgagcatggaagaggcctgctacggtactgagaatcttgaggctattgatcttcacactagtgcaggatacccttatagtgccttggggataaagaaaagagacatcttagaccctaccaccagggacgtgagtaaaatgaagttctacatggacaagtatggtcttgatcttccttactccacttatgtcaaggacgagctacgctcgattgataaaattaagaaagggaagtcccgtctgatcgaggctagtagtctaaatgattcagtgtacctcagaatggctttcggacatttgtatgaggctttccacgcaaatcctgggacaataactggatcagccgtggggtgtaaccctgacacattctggagcaagctgccaattttgctccctggttcactctttgctttcgactactcaggttatgatgccagccttagccctgtctggttcagagcattagaattagttctcagggagatagggtatagtgaagaggcggtctcactcattgagggaatcaaccacacacaccatgtgtatcgtaataagacctattgtgtgcttggtgggatgccctcaggttgttcgggaacatccattttcaactcaatgatcaacaacattatcatcagagcactgctcataaaaacatttaagggcattgacttggatgaactcaacatggtcgcttatggagacgatgtgctcgctagctatcccttcccaattgattgcttggaactagcaaagactggtaaggagtatggtttgaccatgactcctgctgataaatctccttgcttcaatgaggttaattggggtaatgcgaccttccttaaaaggggctttttgcccgatgaacagtttccgttcttgattcaccccactatgccaatgagggagatccatgagtccattcgatggaccaaggacgcccgaaacactcaagatcatgtgcggtccttgtgcctcctagcatggcataatggtaaacaagaatatgagaagtttgtgagcacaattaggtctgttccagtgggaagagcgttggctattccaaattatgaaaaccttagacgcaattggctcgagttattttagaggttatacacacctcaaccccaccagaaatctggtcgtgaatgtgactggtgggggtaaatttgttataaccagaatagcaaaaaaaaaaaaaaaaaaaaaaaaa

SEQ ID NO: 4 - DNA, 6289 bp, Artificial Sequence
  Synthetic sequence
ttaaaacagcctgtgggttgcacccacccacagggcccactgggcgcaagcactctggtaccccggtacctttgtgtgcctgttttatacccccccccccaatgaaacttagaagcagcaaaccacgatcaatagtaggcataacgctccagttatgtcttgatcaagcacttctgtttccccggactgagtatcaatagactgctcgcgcggttgaaggagaaaacgttcgttatccggctagctacttcggaaaacctagtaacaccatgaaagttgcggagagcttcgttcagcactcccccagtgtagatcaggtcgatgagtcaccgcattccccacgggcgaccgtggcggtggctgcgttggcggcctgcccatggggtaacccatggggcgctctaatacggacatggtgtgaagagtctactgagctagttagtagtcctccggcccctgaatgcggctaatcccaactgcggagcacacgcccacaagccagcgggtagtgtgtcgtaacgggtaactctgcagcggaaccgactactttgggtgtccgtgtttccttttatctttatattggctgcttatggtgacaattaaagaattgttaccatatagctattggattggccatccggtgtgcaacagagcaattatttaccaatttgttggttttgtaccattaaccttgaattctgtgaccacccttaattatattttgacccttaacgcagctaaacatgggttcgcaagtgtctacacagcgctccggttctcatgaaaactcaaactcagccactgagggttctaccataaactacaccaccatcaattactacaaagactcttatgctgccacagcaggcaaacagagtctcaagcaggatccagacaagtttgcaaatcctgttaaagacatcttcactgaaatggcagcgccattgaagtccccatccgctgaggcatgtggatacagtgatcgagtggcacaattaactattggcaactccaccatcaccacgcaagaagcggctaacatcatagtcggttatggtgagtggccttcttactgctcagattctgacgctacagcagtggataaaccaacgcgcccggatgtttcagtgaataggttttacacgttagacactaaattatgggagaaatcgtccaagggatggtactggaagttcccggatgtgttaactgaaactggggtttttgggcaaaatgcacaattccactacctctaccgatcagggttctgcatccacgtgcagtgtaatgctagtaaattccaccaaggagcactcctagtcgctgtcctaccagagtatgtcattgggacagtagcaggcggcacagggacggaagatacccaccccccttataagcagacccaacccggtgccgatggcttcgagctgcagcacccgtacgtgcttgacgctggcatcccaatatcacagttaacagtgtgcccacaccagtggattaatttgaggaccaacaattgtgctacaataatagtgccatacattaacgcactgccttttgattctgccttgaaccattgcaactttggcctgctagttgtgcctattagtccactagactacgaccaaggagcgacgccagtaatccctataactatcacattggccccaatgtgttctgagttcgcaggtcttaggcaggcagtcacgcaagggttccctaccgagctaaaacctggcacaaatcaattcttatatgtttgtgccacctggagccccaaagccagattctagggaatcccttgcatggcaaaccgccactaacccctcagtttttgtcaagctgtcagaccctccagcacaggtttcagtgccattcatgtcacctgcgagtgcttatcaatggttttatgacggatatcccacgttcggagaacacaaacaggagaaagatcttgaatatggggcatgtcctaataacatgatgggcacgttctcagtgcggactgtagggtcctccaagtccaagtaccctctagtgattaggatttacatgagaatgaagcacgtcagggcgtggatacctcgcccgatgcgtaaccagaactacctattcaaagccaatccaaattatgctggcaactccgttaagccaactggtgccagtcgcacagcgatcaccactcttgggaaatttggacaacagtctggggctatttatgtgggcaactttagggtggtcaaccgacatcttgccactcacaatgattgggcaaatcttgtttgggaagacagctctcgcgacttgctcgtgtcatccactaccgcccaaggttgcgacacgattgcccgctgcgattgccagacaggggtgtactactgtaactcgatgagaaaacactacccagttagtttttcaaaacccagcctgatctatgtagaggctagcgagtattacccagccaggtaccaatcacatctcatgctcgcacagggtcactcagaacctggtgattgcggtggtatccttaggtgccaacatggcgtcgtcggcatagtgtccactggtggtaatgggcttgttggctttgcagacgtcagagacctcttgtggttagatgaagaagccatggaacagggcgtgtccgactacatcaagggtctcggggatgcttttggaacaggctttactgacgcagtctcaagggaggttgaagctctcaagaactatctcatagggtctgaaggagcagttgagaaaattttgaaaaatctaattaaactaatctctgcactggtgattgtgatcagaagtgattatgatatggttaccctcactgcgaccttggcgctgataggttgtcatggcagtccgtgggcttggatcaaagccaaaacagcctccatcttaggtatccctattgctcaaaagcagagcgcttcctggctcaagaagttcaatgatatggccaacgccgctaaggggttagagtgggtttccaacaagatcagcaaatttattgattggcttaaggagaagatagtaccagcagctagggagaaggttgaattcctaaataacttgaaacagctgccactgctagagaatcagatctcaaacttggaacaatctgctgcctcacaagaggaccttgaaatcatgtttgggaatgtatcgtacctagctcacttctgccgcaagttccaaccgctatacgccacggaagctaggagagtctatgccctggagaagaggatgaataactatatgcagttcaagagcaaacaccgaattgaacctgtatgtctcatcattaggggctcaccaggcactgggaagtctctagccactggtattattgctcgagcaatcgctgataagtaccactccagcgtgtactcgctcccaccagacccagatcattttgacggttacaagcaacaggtggttaccgtgatggatgatctgtgccaaaaccccgacggaaaggatatgtctttattctgtcaaatggtatccaccgtagacttcattccaccaatggcttccctcgaggagaagggagtttccttcacctctaagtttgtcatcgcatccactaatgccagtaatatcatagtaccaacagtgtctgattccgacgctattcgccgcaggttctacatggactgtgacattgaagtgacagactcatacaaaacagatctaggtagactggatgcagggcgagccgctaaactgtgctctgagaacaacactgcaaatttcaaacgttgtagcccgttagtgtgcgggaaagctatccaacttagagatagaaagtctaaagtcagatacagtgtggatacggtggtttcagaacttattagggaatacagcaataggtccgctattggcaacacaatcgaggctcttttccaaggtccacccaagttcaggccaattaggattagccttgaagaaaaaccagccccagacgctattagcgatctccttgctagcgtagatagtgaagaagtgcgccagtactgcagggatcaaggctggattattcctgaagttcccaccaatgtagagcggcaccttaatagagcggtgcttgtcatgcaatccatcgccacagtagtggcagttgtctcgttggtgtatgtcatctacaagctctttgcagggttccagggtgcgtattctggtgctcctaagcaagtgcttaagaaacctgcccttcgcacagcaacagtacagggcccgagccttgactttgctctctccctactgagaaggaacatcagacaagttcaaacagaccaggggcatttcaccatgttgggtgttagggatcgcttagcagtccttccacgtcactcacaacctggcaaaactatttgggttgaacacaaactcgtgaacgtccttgatgcagttgaactggtggatgagcaaggagtcaacctggaattgaccctcattactcttgacaccaacgagaagtttagggatattaccaagttcatcccggaaaatattagcactgctagtgatgccaccctagtgatcaacacggagcatatgccatcaatgtttgtcccggtgggtgacgttgtgcagtatggctttttgaatctcagtggtaagcctacccatcgcaccatgatgtacaactttcctactaaagcagggcagtgtggaggagtagtgacatctgttgggaaggttgtcggtattcacattggtggcaatggcagacagggtttttgcgcaggcctcaaaaggagttactttgctagtgaacaaggagagatccaatgggttaagcccaacaaagaaactggaagactcaacattaatggaccaacccgcaccaaattagaacctagtgtattccatgacatcttcgagggaaataaagagccagctgtcttgcacagtaaagacccccgacttgaagtagattttgaacaggccctgttctctaagtatgtgggaaacacactacatgagcctgacgagtacatcaaagaggcggctcttcattacgcgaaccaattgaagcaattagaaattaatacctctcaaatgagcatggaagaggcctgctacggtactgagaatcttgaggctattgatcttcacactagtgcaggatacccttatagtgccttggggataaagaaaagagacatcttagaccctaccaccagggacgtgagtaaaatgaagttctacatggacaagtatggtcttgatcttccttactccacttatgtcaaggacgagctacgctcgattgataaaattaagaaagggaagtcccgtctgatcgaggctagtagtctaaatgattcagtgtacctcagaatggctttcggacatttgtatgaggctttccacgcaaatcctgggacaataactggatcagccgtggggtgtaaccctgacacattctggagcaagctgccaattttgctccctggttcactctttgctttcgactactcaggttatgatgccagccttagccctgtctggttcagagcattagaattagttctcagggagatagggtatagtgaagaggcggtctcactcattgagggaatcaaccacacacaccatgtgtatcgtaataagacctattgtgtgcttggtgggatgccctcaggttgttcgggaacatccattttcaactcaatgatcaacaacattatcatcagagcactgctcataaaaacatttaagggcattgacttggatgaactcaacatggtcgcttatggagacgatgtgctcgctagctatcccttcccaattgattgcttggaactagcaaagactggtaaggagtatggtttgaccatgactcctgctgataaatctccttgcttcaatgaggttaattggggtaatgcgaccttccttaaaaggggctttttgcccgatgaacagtttccgttcttgattcaccccactatgccaatgagggagatccatgagtccattcgatggaccaaggacgcccgaaacactcaagatcatgtgcggtccttgtgcctcctagcatggcataatggtaaacaagaatatgagaagtttgtgagcacaattaggtctgttccagtgggaagagcgttggctattccaaattatgaaaaccttagacgcaattggctcgagttattttagaggttatacacacctcaaccccaccagaaatctggtcgtgaatgtgactggtgggggtaaatttgttataaccagaatagcaaaaaaaaaaaaaaaaaaaaaaaaa

SEQ ID NO: 5 - DNA, 6288 bp, Artificial Sequence
  Synthetic sequence
ttaaaacagcctgtgggttgcacccacccacagggcccactgggcgcaagcactctggtaccccggtacctttgtgtgcctgttttatacccccccccccaatgaaacttagaagcagcaaaccacgatcaatagtaggcataacgctccagttatgtcttgatcaagcacttctgtttccccggactgagtatcaatagactgctcgcgcggttgaaggagaaaacgttcgttatccggctagctacttcggaaaacctagtaacaccatgaaagttgcggagagcttcgttcagcactcccccagtgtagatcaggtcgatgagtcaccgcattccccacgggcgaccgtggcggtggctgcgttggcggcctgcccatggggtaacccatggggcgctctaatacggacatggtgtgaagagtctactgagctagttagtagtcctccggcccctgaatgcggctaatcccaactgcggagcacacgcccacaagccagcgggtagtgtgtcgtaacgggtaactctgcagcggaaccgactactttgggtgtccgtgtttccttttatctttatattggctgcttatggtgacaattaaagaattgttaccatatagctattggattggccatccggtgtgcaacagagcaattatttaccaatttgttggttttgtaccattaaccttgaattctgtgaccacccttaattatattttgacccttaacgcagctaaacatgggttcgcaagtgtctacacagcgctccggttctcatgaaaactcaaactcagccactgagggttctaccataaactacaccaccatcaattactacaaagactcttatgctgccacagcaggcaaacagagtctcaagcaggatccagacaagtttgcaaatcctgttaaagacatcttcactgaaatggcagcgccattgaagtccccatccgctgaggcatgtggatacagtgatcgagtggcacaattaactattggcaactccaccatcaccacgcaagaagcggctaacatcatagtcggttatggtgagtggccttcttactgctcagattctgacgctacagcagtggataaaccaacgcgcccggatgtttcagtgaataggttttacacgttagacactaaattatgggagaaatcgtccaagggatggtactggaagttcccggatgtgttaactgaaactggggtttttgggcaaaatgcacaattccactacctctaccgatcagggttctgcatccacgtgcagtgtaatgctagtaaattccaccaaggagcactcctagtcgctgtcctaccagagtatgtcattgggacagtagcaggcggcacagggacggaagatacccaccccccttataagcagacccaacccggtgccgatggcttcgagctgcagcacccgtacgtgcttgacgctggcatcccaatatcacagttaacagtgtgcccacaccagtggattaatttgaggaccaacaattgtgctacaataatagtgccatacattaacgcactgccttttgattctgccttgaaccattgcaactttggcctgctagttgtgcctattagtccactagactacgaccaaggagcgacgccagtaatccctataactatcacattggccccaatgtgttctgagttcgcaggtcttaggcaggcagtcacgcaagggttccctaccgagctaaaacctggcacaaatcaattctatatgtttgtgccacctggagccccaaagccagattctagggaatcccttgcatggcaaaccgccactaacccctcagtttttgtcaagctgtcagaccctccagcacaggtttcagtgccattcatgtcacctgcgagtgcttatcaatggttttatgacggatatcccacgttcggagaacacaaacaggagaaagatcttgaatatggggcatgtcctaataacatgatgggcacgttctcagtgcggactgtagggtcctccaagtccaagtaccctctagtgattaggatttacatgagaatgaagcacgtcagggcgtggatacctcgcccgatgcgtaaccagaactacctattcaaagccaatccaaattatgctggcaactccgttaagccaactggtgccagtcgcacagcgatcaccactcttgggaaatttggacaacagtctggggctatttatgtgggcaactttagggtggtcaaccgacatcttgccactcacaatgattgggcaaatcttgtttgggaagacagctctcgcgacttgctcgtgtcatccactaccgcccaaggttgcgacacgattgcccgctgcgattgccagacaggggtgtactactgtaactcgatgagaaaacactacccagttagtttttcaaaacccagcctgatctatgtagaggctagcgagtattacccagccaggtaccaatcacatctcatgctcgcacagggtcactcagaacctggtgattgcggtggtatccttaggtgccaacatggcgtcgtcggcatagtgtccactggtggtaatgggcttgttggctttgcagacgtcagagacctcttgtggttagatgaagaagccatggaacagggcgtgtccgactacatcaagggtctcggggatgcttttggaacaggctttactgacgcagtctcaagggaggttgaagctctcaagaactatctcatagggtctgaaggagcagttgagaaaattttgaaaaatctaattaaactaatctctgcactggtgattgtgatcagaagtgattatgatatggttaccctcactgcgaccttggcgctgataggttgtcatggcagtccgtgggcttggatcaaagccaaaacagcctccatcttaggtatccctattgctcaaaagcagagcgcttcctggctcaagaagttcaatgatatggccaacgccgctaaggggttagagtgggtttccaacaagatcagcaaatttattgattggcttaaggagaagatagtaccagcagctagggagaaggttgaattcctaaataacttgaaacagctgccactgctagagaatcagatctcaaacttggaacaatctgctgcctcacaagaggaccttgaaatcatgtttgggaatgtatcgtacctagctcacttctgccgcaagttccaaccgctatacgccacggaagctaggagagtctatgccctggagaagaggatgaataactatatgcagttcaagagcaaacaccgaattgaacctgtatgtctcatcattaggggctcaccaggcactgggaagtctctagccactggtattattgctcgagcaatcgctgataagtaccactccagcgtgtactcgctcccaccagacccagatcattttgacggttacaagcaacaggtggttaccgtgatggatgatctgtgccaaaaccccgacggaaaggatatgtctttattctgtcaaatggtatccaccgtagacttcattccaccaatggcttccctcgaggagaagggagtttccttcacctctaagtttgtcatcgcatccactaatgccagtaatatcatagtaccaacagtgtctgattccgacgctattcgccgcaggttctacatggactgtgacattgaagtgacagactcatacaaaacagatctaggtagactggatgcagggcgagccgctaaactgtgctctgagaacaacactgcaaatttcaaacgttgtagcccgttagtgtgcgggaaagctatccaacttagagatagaaagtctaaagtcagatacagtgtggatacggtggtttcagaacttattagggaatacagcaataggtccgctattggcaacacaatcgaggctcttttccaaggtccacccaagttcaggccaattaggattagccttgaagaaaaaccagccccagacgctattagcgatctccttgctagcgtagatagtgaagaagtgcgccagtactgcagggatcaaggctggattattcctgaagttcccaccaatgtagagcggcaccttaatagagcggtgcttgtcatgcaatccatcgccacagtagtggcagttgtctcgttggtgtatgtcatctacaagctctttgcagggttccagggtgcgtattctggtgctcctaagcaagtgcttaagaaacctgcccttcgcacagcaacagtacagggcccgagccttgactttgctctctccctactgagaaggaacatcagacaagttcaaacagaccaggggcatttcaccatgttgggtgttagggatcgcttagcagtccttccacgtcactcacaacctggcaaaactatttgggttgaacacaaactcgtgaacgtccttgatgcagttgaactggtggatgagcaaggagtcaacctggaattgaccctcattactcttgacaccaacgagaagtttagggatattaccaagttcatcccggaaaatattagcactgctagtgatgccaccctagtgatcaacacggagcatatgccatcaatgtttgtcccggtgggtgacgttgtgcagtatggctttttgaatctcagtggtaagcctacccatcgcaccatgatgtacaactttcctactaaagcagggcagtgtggaggagtagtgacatctgttgggaaggttgtcggtattcacattggtggcaatggcagacagggtttttgcgcaggcctcaaaaggagttactttgctagtgaacaaggagagatccaatgggttaagcccaacaaagaaactggaagactcaacattaatggaccaacccgcaccaaattagaacctagtgtattccatgacatcttcgagggaaataaagagccagctgtcttgcacagtaaagacccccgacttgaagtagattttgaacaggccctgttctctaagtatgtgggaaacacactacatgagcctgacgagtacatcaaagaggcggctcttcattacgcgaaccaattgaagcaattagaaattaatacctctcaaatgagcatggaagaggcctgctacggtactgagaatcttgaggctattgatcttcacactagtgcaggatacccttatagtgccttggggataaagaaaagagacatcttagaccctaccaccagggacgtgagtaaaatgaagttctacatggacaagtatggtcttgatcttccttactccacttatgtcaaggacgagctacgctcgattgataaaattaagaaagggaagtcccgtctgatcgaggctagtagtctaaatgattcagtgtacctcagaatggctttcggacatttgtatgaggctttccacgcaaatcctgggacaataactggatcagccgtggggtgtaaccctgacacattctggagcaagctgccaattttgctccctggttcactctttgctttcgactactcaggttatgatgccagccttagccctgtctggttcagagcattagaattagttctcagggagatagggtatagtgaagaggcggtctcactcattgagggaatcaaccacacacaccatgtgtatcgtaataagacctattgtgtgcttggtgggatgccctcaggttgttcgggaacatccattttcaactcaatgatcaacaacattatcatcagagcactgctcataaaaacatttaagggcattgacttggatgaactcaacatggtcgcttatggagacgatgtgctcgctagctatcccttcccaattgattgcttggaactagcaaagactggtaaggagtatggtttgaccatgactcctgctgataaatctccttgcttcaatgaggttaattggggtaatgcgaccttccttaaaaggggctttttgcccgatgaacagtttccgttcttgattcaccccactatgccaatgagggagatccatgagtccattcgatggaccaaggacgcccgaaacactcaagatcatgtgcggtccttgtgcctcctagcatggcataatggtaaacaagaatatgagaagtttgtgagcacaattaggtctgttccagtgggaagagcgttggctattccaaattatgaaaaccttagacgcaattggctcgagttattttagaggttatacacacctcaaccccaccagaaatctggtcgtgaatgtgactggtgggggtaaatttgttataaccagaatagcaaaaaaaaaaaaaaaaaaaaaaaaa

SEQ ID NO: 6 - DNA, 6288 bp, Artificial Sequence; identical to SEQ ID NO: 5
  Synthetic sequence

SEQ ID NO: 7 - DNA, 2823 bp, Artificial Sequence
  Synthetic sequence
ttaaaacagcctgtgggttgcacccacccacagggcccactgggcgcaagcactctggtaccccggtacctttgtgtgcctgttttatacccccccccccaatgaaacttagaagcagcaaaccacgatcaatagtaggcataacgctccagttatgtcttgatcaagcacttctgtttccccggactgagtatcaatagactgctcgcgcggttgaaggagaaaacgttcgttatccggctagctacttcggaaaacctagtaacaccatgaaagttgcggagagcttcgttcagcactcccccagtgtagatcaggtcgatgagtcaccgcattccccacgggcgaccgtggcggtggctgcgttggcggcctgcccatggggtaacccatggggcgctctaatacggacatggtgtgaagagtctactgagctagttagtagtcctccggcccctgaatgcggctaatcccaactgcggagcacacgcccacaagccagcgggtagtgtgtcgtaacgggtaactctgcagcggaaccgactactttgggtgtccgtgtttccttttatctttatattggctgcttatggtgacaattaaagaattgttaccatatagctattggattggccatccggtgtgcaacagagcaattatttaccaatttgttggttttgtaccattaaccttgaattctgtgaccacccttaattatattttgacccttaacgcagctaaacatgggttcgcaagtgtctacacagcgctccggttctcatgaaaactcaaactcagccactgagggttctaccataaactacaccaccatcaattactacaaagactcttatgctgccacagcaggcaaacagagtctcaagcaggatccagacaagtttgcaaatcctgttaaagacatcttcactgaaatggcagcgccattgaagtccccatccgctgaggcatgtggatacagtgatcgagtggcacaattaactattggcaactccaccatcaccacgcaagaagcggctaacatcatagtcggttatggtgagtggccttcttactgctcagattctgacgctacagcagtggataaaccaacgcgcccggatgtttcagtgaataggttttacacgttagacactaaattatgggagaaatcgtccaagggatggtactggaagttcccggatgtgttaactgaaactggggtttttgggcaaaatgcacaattccactacctctaccgatcagggttctgcatccacgtgcagtgtaatgctagtaaattccaccaaggagcactcctagtcgctgtcctaccagagtatgtcattgggacagtagcaggcggcacagggacggaagatacccaccccccttataagcagacccaacccggtgccgatggcttcgagctgcagcacccgtacgtgcttgacgctggcatcccaatatcacagttaacagtgtgcccacaccagtggattaatttgaggaccaacaattgtgctacaataatagtgccatacattaacgcactgccttttgattctgccttgaaccattgcaactttggcctgctagttgtgcctattagtccactagactacgaccaaggagcgacgccagtaatccctataactatcacattggccccaatgtgttctgagttcgcaggtcttaggcaggcagtcacgcaagggttccctaccgagctaaaacctggcacaaatcaattcttaaccaccgatgatggtgtctcagcacctattctaccaaacttccaccccaccccgtgtatccacatacctggtgaagtgaggaatttgctagagttatgccaggtggaaaccattctggaggttaatgtgtacctcagaatggctttcggacatttgtatgaggctttccacgcaaatcctgggacaataactggatcagccgtggggtgtaaccctgacacattctggagcaagctgccaattttgctccctggttcactctttgctttcgactactcaggttatgatgccagccttagccctgtctggttcagagcattagaattagttctcagggagatagggtatagtgaagaggcggtctcactcattgagggaatcaaccacacacaccatgtgtatcgtaataagacctattgtgtgcttggtgggatgccctcaggttgttcgggaacatccattttcaactcaatgatcaacaacattatcatcagagcactgctcataaaaacatttaagggcattgacttggatgaactcaacatggtcgcttatggagacgatgtgctcgctagctatcccttcccaattgattgcttggaactagcaaagactggtaaggagtatggtttgaccatgactcctgctgataaatctccttgcttcaatgaggttaattggggtaatgcgaccttccttaaaaggggctttttgcccgatgaacagtttccgttcttgattcaccccactatgccaatgagggagatccatgagtccattcgatggaccaaggacgcccgaaacactcaagatcatgtgcggtccttgtgcctcctagcatggcataatggtaaacaagaatatgagaagtttgtgagcacaattaggtctgttccagtgggaagagcgttggctattccaaattatgaaaaccttagacgcaattggctcgagttattttagaggttatacacacctcaaccccaccagaaatctggtcgtgaatgtgactggtgggggtaaatttgttataaccagaatagcaaaaaaaaaaaaaaaaaaaaaaaaa

SEQ ID NO: 8 - DNA, 4428 bp, Artificial Sequence
  Synthetic sequence
ttaaaacagcctgtgggttgcacccacccacagggcccactgggcgcaagcactctggtaccccggtacctttgtgtgcctgttttatacccccccccccaatgaaacttagaagcagcaaaccacgatcaatagtaggcataacgctccagttatgtcttgatcaagcacttctgtttccccggactgagtatcaatagactgctcgcgcggttgaaggagaaaacgttcgttatccggctagctacttcggaaaacctagtaacaccatgaaagttgcggagagcttcgttcagcactcccccagtgtagatcaggtcgatgagtcaccgcattccccacgggcgaccgtggcggtggctgcgttggcggcctgcccatggggtaacccatggggcgctctaatacggacatggtgtgaagagtctactgagctagttagtagtcctccggcccctgaatgcggctaatcccaactgcggagcacacgcccacaagccagcgggtagtgtgtcgtaacgggtaactctgcagcggaaccgactactttgggtgtccgtgtttccttttatctttatattggctgcttatggtgacaattaaagaattgttaccatatagctattggattggccatccggtgtgcaacagagcaattatttaccaatttgttggttttgtaccattaaccttgaattctgtgaccacccttaattatattttgacccttaacgcagctaaacatgggttcgcaagtgtctacacagcgctccggttctcatgaaaactcaaactcagccactgagggttctaccataaactacaccaccatcaattactacaaagactcttatgctgccacagcaggcaaacagagtctcaagcaggatccagacaagtttgcaaatcctgttaaagacatcttcactgaaatggcagcgccattgaagtccccatccgctgaggcatgtggatacagtgatcgagtggcacaattaactattggcaactccaccatcaccacgcaagaagcggctaacatcatagtcggttatggtgagtggccttcttactgctcagattctgacgctacagcagtggataaaccaacgcgcccggatgtttcagtgaataggttttacacgttagacactaaattatgggagaaatcgtccaagggatggtactggaagttcccggatgtgttaactgaaactggggtttttgggcaaaatgcacaattccactacctctaccgatcagggttctgcatccacgtgcagtgtaatgctagtaaattccaccaaggagcactcctagtcgctgtcctaccagagtatgtcattgggacagtagcaggcggcacagggacggaagatacccaccccccttataagcagacccaacccggtgccgatggcttcgagctgcagcacccgtacgtgcttgacgctggcatcccaatatcacagttaacagtgtgcccacaccagtggattaatttgaggaccaacaattgtgctacaataatagtgccatacattaacgcactgccttttgattctgccttgaaccattgcaactttggcctgctagttgtgcctattagtccactagactacgaccaaggagcgacgccagtaatccctataactatcacattggccccaatgtgttctgagttcgcaggtcttaggcaggcagtcacgcaagggttccctaccgagctaaaacctggcacaaatcaattcttaaccaccgatgatggtgtctcagcacctattctaccaaacttccaccccaccccgtgtatccacatacctggtgaagtgaggaatttgctagagttatgccaggtggaaaccattctggaggttaataatgtgcccacgaatgccactagcttgatggagagactgcgcttcccggtctcagcacaagcagggaaaggtgaactgtgtgcggtgtttagagccgatcctgggcgaaacggaccatggcaatccaccttactgggtcagttgtgcgggtactacacccaatggtcaggatcattggaggtcaccttcatgtttactggatccttcatggctaccggcaagatgctcatagcctatacaccgccaggaggtcctctgcccaaggaccgggcgaccgccatgttgggcacgcacgtcatctgggattttgggctgcaatcgtctgttacccttgtaataccatggatcagcaacactcattatagagcacatgcccgagatggagtgtttgactactacaccacagggttggtcagtatatggtatcagacaaattacgtggttccaattggtgcgcccaacacagcctatataatagcactagcggcagcccaaaagaacttcactatgaaattgtgcaaggatgctagtgatatcttgcagacgggcaccatccagggagatagggtggcagatgtaattgaaagctccataggagatagcgtgagcagagccctcactcacgctctaccagcacccacaggtcagaacacacaggtgagcagtcatcgactggatacgggcaaggttccagcactccaagctgctgaaattggagcatcatcaaatgctagtgacgagagtatgattgagacacgctgtgtcctcaactcgcacagtacagcagagaccactcttgatagtttcttcagcagggcgggattagttggagagatagatctccctcttgagggcacaactaacccaaatggttatgccaactgggacatagatataacaggttacgcgcaaatgcgtagaaaggtagagctcttcacctacatgcgctttgatgcagagttcacttttgttgcgtgtacacctaccggggaagttgttccacaactgctccaatatatgtttgtgccacctggagccccaaagccagattctagggaatcccttgcatggcaaaccgccactaacccctcagtttttgtcaagctgtcagaccctccagcacaggtttcagtgccattcatgtcacctgcgagtgcttatcaatggttttatgacggatatcccacgttcggagaacacaaacaggagaaagatcttgaatatggggcatgtcctaataacatgatgggcacgttctcagtgcggactgtagggtcctccaagtccaagtaccctctagtgattaggatttacatgagaatgaagcacgtcagggcgtggatacctcgcccgatgcgtaaccagaactacctattcaaagccaatccaaattatgctggcaactccgttaagccaactggtgccagtcgcacagcgatcaccactcttgggaaatttggacaacagtctggggctatttatgtgggcaactttagggtggtcaaccgacatcttgccactcacaatgattgggcaaatcttgtttgggaagacagctctcgcgacttgctcgtgtcatccactaccgcccaaggttgcgacacgattgcccgctgcgattgccagacaggggtgtatgaggctttccacgcaaatcctgggacaataactggatcagccgtggggtgtaaccctgacacattctggagcaagctgccaattttgctccctggttcactctttgctttcgactactcaggttatgatgccagccttagccctgtctggttcagagcattagaattagttctcagggagatagggtatagtgaagaggcggtctcactcattgagggaatcaaccacacacaccatgtgtatcgtaataagacctattgtgtgcttggtgggatgccctcaggttgttcgggaacatccattttcaactcaatgatcaacaacattatcatcagagcactgctcataaaaacatttaagggcattgacttggatgaactcaacatggtcgcttatggagacgatgtgctcgctagctatcccttcccaattgattgcttggaactagcaaagactggtaaggagtatggtttgaccatgactcctgctgataaatctccttgcttcaatgaggttaattggggtaatgcgaccttccttaaaaggggctttttgcccgatgaacagtttccgttcttgattcaccccactatgccaatgagggagatccatgagtccattcgatggaccaaggacgcccgaaacactcaagatcatgtgcggtccttgtgcctcctagcatggcataatggtaaacaagaatatgagaagtttgtgagcacaattaggtctgttccagtgggaagagcgttggctattccaaattatgaaaaccttagacgcaattggctcgagttattttagaggttatacacacctcaaccccaccagaaatctggtcgtgaatgtgactggtgggggtaaatttgttataaccagaatagcaaaaaaaaaaaaaaaaaaaaaaaaa

SEQ ID NO: 9 - DNA, 7272 bp, Artificial Sequence
  Synthetic sequence
ttaaaacagcctgtgggttgcacccacccacagggcccactgggcgcaagcactctggtaccccggtacctttgtgtgcctgttttatacccccccccccaatgaaacttagaagcagcaaaccacgatcaatagtaggcataacgctccagttatgtcttgatcaagcacttctgtttccccggactgagtatcaatagactgctcgcgcggttgaaggagaaaacgttcgttatccggctagctacttcggaaaacctagtaacaccatgaaagttgcggagagcttcgttcagcactcccccagtgtagatcaggtcgatgagtcaccgcattccccacgggcgaccgtggcggtggctgcgttggcggcctgcccatggggtaacccatggggcgctctaatacggacatggtgtgaagagtctactgagctagttagtagtcctccggcccctgaatgcggctaatcccaactgcggagcacacgcccacaagccagcgggtagtgtgtcgtaacgggtaactctgcagcggaaccgactactttgggtgtccgtgtttccttttatctttatattggctgcttatggtgacaattaaagaattgttaccatatagctattggattggccatccggtgtgcaacagagcaattatttaccaatttgttggttttgtaccattaaccttgaattctgtgaccacccttaattatattttgacccttaacgcagctaaacatgggttcgcaagtgtctacacagcgctccggttctcatgaaaactcaaactcagccactgagggttctaccataaactacaccaccatcaattactacaaagactcttatgctgccacagcaggcaaacagagtctcaagcaggatccagacaagtttgcaaatcctgttaaagacatcttcactgaaatggcagcgccattgaagtccccatccgctgaggcatgtggatacagtgatcgagtggcacaattaactattggcaactccaccatcaccacgcaagaagcggctaacatcatagtcggttatggtgagtggccttcttactgctcagattctgacgctacagcagtggataaaccaacgcgcccggatgtttcagtgaataggttttacacgttagacactaaattatgggagaaatcgtccaagggatggtactggaagttcccggatgtgttaactgaaactggggtttttgggcaaaatgcacaattccactacctctaccgatcagggttctgcatccacgtgcagtgtaatgctagtaaattccaccaaggagcactcctagtcgctgtcctaccagagtatgtcattgggacagtagcaggcggcacagggacggaagatacccaccccccttataagcagacccaacccggtgccgatggcttcgagctgcagcacccgtacgtgcttgacgctggcatcccaatatcacagttaacagtgtgcccacaccagtggattaatttgaggaccaacaattgtgctacaataatagtgccatacattaacgcactgccttttgattctgccttgaaccattgcaactttggcctgctagttgtgcctattagtccactagactacgaccaaggagcgacgccagtaatccctataactatcacattggccccaatgtgttctgagttcgcaggtcttaggcaggcagtcacgcaagggttccctaccgagctaaaacctggcacaaatcaattcttaaccaccgatgatggtgtctcagcacctattctaccaaacttccaccccaccccgtgtatccacatacctggtgaagtgaggaatttgctagagttatgccaggtggaaaccattctggaggttaataatgtgcccacgaatgccactagcttgatggagagactgcgcttcccggtctcagcacaagcagggaaaggtgaactgtgtgcggtgtttagagccgatcctgggcgaaacggaccatggcaatccaccttactgggtcagttgtgcgggtactacacccaatggtcaggatcattggaggtcaccttcatgtttactggatccttcatggctaccggcaagatgctcatagcctatacaccgccaggaggtcctctgcccaaggaccgggcgaccgccatgttgggcacgcacgtcatctgggattttgggctgcaatcgtctgttacccttgtaataccatggatcagcaacactcattatagagcacatgcccgagatggagtgtttgactactacaccacagggttggtcagtatatggtatcagacaaattacgtggttccaattggtgcgcccaacacagcctatataatagcactagcggcagcccaaaagaacttcactatgaaattgtgcaaggatgctagtgatatcttgcagacgggcaccatccagggagatagggtggcagatgtaattgaaagctccataggagatagcgtgagcagagccctcactcacgctctaccagcacccacaggtcagaacacacaggtgagcagtcatcgactggatacgggcaaggttccagcactccaagctgctgaaattggagcatcatcaaatgctagtgacgagagtatgattgagacacgctgtgtcctcaactcgcacagtacagcagagaccactcttgatagtttcttcagcagggcgggattagttggagagatagatctccctcttgagggcacaactaacccaaatggttatgccaactgggacatagatataacaggttacgcgcaaatgcgtagaaaggtagagctcttcacctacatgcgctttgatgcagagttcacttttgttgcgtgtacacctaccggggaagttgttccacaactgctccaatatatgtttgtgccacctggagccccaaagccagattctagggaatcccttgcatggcaaaccgccactaacccctcagtttttgtcaagctgtcagaccctccagcacaggtttcagtgccattcatgtcacctgcgagtgcttatcaatggttttatgacggatatcccacgttcggagaacacaaacaggagaaagatcttgaatatggggcatgtcctaataacatgatgggcacgttctcagtgcggactgtagggtcctccaagtccaagtaccctctagtgattaggatttacatgagaatgaagcacgtcagggcgtggatacctcgcccgatgcgtaaccagaactacctattcaaagccaatccaaattatgctggcaactccgttaagccaactggtgccagtcgcacagcgatcaccactcttgggaaatttggacaacagtctggggctatttatgtgggcaactttagggtggtcaaccgacatcttgccactcacaatgattgggcaaatcttgtttgggaagacagctctcgcgacttgctcgtgtcatccactaccgcccaaggttgcgacacgattgcccgctgcgattgccagacaggggtgtactactgtaactcgatgagaaaacactacccagttagtttttcaaaacccagcctgatctatgtagaggctagcgagtattacccagccaggtaccaatcacatctcatgctcgcacagggtcactcagaacctggtgattgcggtggtatccttaggtgccaacatggcgtcgtcggcatagtgtccactggtggtaatgggcttgttggctttgcagacgtcagagacctcttgtggttagatgaagaagccatggaacagggcgtgtccgactacatcaagggtctcggggatgcttttggaacaggctttactgacgcagtctcaagggaggttgaagctctcaagaactatctcatagggtctgaaggagcagttgagaaaattttgaaaaatctaattaaactaatctctgcactggtgattgtgatcagaagtgattatgatatggttaccctcactgcgaccttggcgctgataggttgtcatggcagtccgtgggcttggatcaaagccaaaacagcctccatcttaggtatccctattgctcaaaagcagagcgcttcctggctcaagaagttcaatgatatggccaacgccgctaaggggttagagtgggtttccaacaagatcagcaaatttattgattggcttaaggagaagatagtaccagcagctagggagaaggttgaattcctaaataacttgaaacagctgccactgctagagaatcagatctcaaacttggaacaatctgctgcctcacaagaggaccttgaaatcatgtttgggaatgtatcgtacctagctcacttctgccgcaagttccaaccgctatacgccacggaagctaggagagtctatgccctggagaagaggatgaataactatatgcagttcaagagcaaacaccgaattgaacctgtatgtctcatcattaggggctcaccaggcactgggaagtctctagccactggtattattgctcgagcaatcgctgataagtaccactccagcgtgtactcgctcccaccagacccagatcattttgacggttacaagcaacaggtggttaccgtgatggatgatctgtgccaaaaccccgacggaaaggatatgtctttattctgtcaaatggtatccaccgtagacttcattccaccaatggcttccctcgaggagaagggagtttccttcacctctaagtttgtcatcgcatccactaatgccagtaatatcatagtaccaacagtgtctgattccgacgctattcgccgcaggttctacatggactgtgacattgaagtgacagactcatacaaaacagatctaggtagactggatgcagggcgagccgctaaactgtgctctgagaacaacactgcaaatttcaaacgttgtagcccgttagtgtgcgggaaagctatccaacttagagatagaaagtctaaagtcagatacagtgtggatacggtggtttcagaacttattagggaatacagcaataggtccgctattggcaacacaatcgaggctcttttccaaggtccacccaagttcaggccaattaggattagccttgaagaaaaaccagccccagacgctattagcgatctccttgctagcgtagatagtgaagaagtgcgccagtactgcagggatcaaggctggattattcctgaagttcccaccaatgtagagcggcaccttaatagagcggtgcttgtcatgcaatccatcgccacagtagtggcagttgtctcgttggtgtatgtcatctacaagctctttgcagggttccagggtgcgtattctggtgctcctaagcaagtgcttaagaaacctgcccttcgcacagcaacagtacagggcccgagccttgactttgctctctccctactgagaaggaacatcagacaagttcaaacagaccaggggcatttcaccatgttgggtgttagggatattaccaagttcatcccggaaaatattagcactgctagtgatgccaccctagtgatcaacacggagcatatgccatcaatgtttgtcccggtgggtgacgttgtgcagtatggctttttgaatctcagtggtaagcctacccatcgcaccatgatgtacaactttcctactaaagcagggcagtgtggaggagtagtgacatctgttgggaaggttgtcggtattcacattggtggcaatggcagacagggtttttgcgcaggcctcaaaaggagttactttgctagtgaacaaggagagatccaatgggttaagcccaacaaagaaactggaagactcaacattaatggaccaacccgcaccaaattagaacctagtgtattccatgacatcttcgagggaaataaagagccagctgtcttgcacagtaaagacccccgacttgaagtagattttgaacaggccctgttctctaagtatgtgggaaacacactacatgagcctgacgagtacatcaaagaggcggctcttcattacgcgaaccaattgaagcaattagaaattaatacctctcaaatgagcatggaagaggcctgctacggtactgagaatcttgaggctattgatcttcacactagtgcaggatacccttatagtgccttggggataaagaaaagagacatcttagaccctaccaccagggacgtgagtaaaatgaagttctacatggacaagtatggtcttgatcttccttactccacttatgtcaaggacgagctacgctcgattgataaaattaagaaagggaagtcccgtctgatcgaggctagtagtctaaatgattcagtgtacctcagaatggctttcggacatttgtatgaggctttccacgcaaatcctgggacaataactggatcagccgtggggtgtaaccctgacacattctggagcaagctgccaattttgctccctggttcactctttgctttcgactactcaggttatgatgccagccttagccctgtctggttcagagcattagaattagttctcagggagatagggtatagtgaagaggcggtctcactcattgagggaatcaaccacacacaccatgtgtatcgtaataagacctattgtgtgcttggtgggatgccctcaggttgttcgggaacatccattttcaactcaatgatcaacaacattatcatcagagcactgctcataaaaacatttaagggcattgacttggatgaactcaacatggtcgcttatggagacgatgtgctcgctagctatcccttcccaattgattgcttggaactagcaaagactggtaaggagtatggtttgaccatgactcctgctgataaatctccttgcttcaatgaggttaattggggtaatgcgaccttccttaaaaggggctttttgcccgatgaacagtttccgttcttgattcaccccactatgccaatgagggagatccatgagtccattcgatggaccaaggacgcccgaaacactcaagatcatgtgcggtccttgtgcctcctagcatggcataatggtaaacaagaatatgagaagtttgtgagcacaattaggtctgttccagtgggaagagcgttggctattccaaattatgaaaaccttagacgcaattggctcgagttattttagaggttatacacacctcaaccccaccagaaatctggtcgtgaatgtgactggtgggggtaaatttgttataaccagaatagcaaaaaaaaaaaaaaaaaaaaaaaaa

SEQ ID NO: 10 - DNA, 7165 bp, Artificial Sequence
  Synthetic sequence
ttaaaacagcctgtgggttgcacccacccacagggcccactgggcgcaagcactctggtaccccggtacctttgtgtgcctgttttatacccccccccccaatgaaacttagaagcagcaaaccacgatcaatagtaggcataacgctccagttatgtcttgatcaagcacttctgtttccccggactgagtatcaatagactgctcgcgcggttgaaggagaaaacgttcgttatccggctagctacttcggaaaacctagtaacaccatgaaagttgcggagagcttcgttcagcactcccccagtgtagatcaggtcgatgagtcaccgcattccccacgggcgaccgtggcggtggctgcgttggcggcctgcccatggggtaacccatggggcgctctaatacggacatggtgtgaagagtctactgagctagttagtagtcctccggcccctgaatgcggctaatcccaactgcggagcacacgcccacaagccagcgggtagtgtgtcgtaacgggtaactctgcagcggaaccgactactttgggtgtccgtgtttccttttatctttatattggctgcttatggtgacaattaaagaattgttaccatatagctattggattggccatccggtgtgcaacagagcaattatttaccaatttgttggttttgtaccattaaccttgaattctgtgaccacccttaattatattttgacccttaacgcagctaaacatgggttcgcaagtgtctacacagcgctccggttctcatgaaaactcaaactcagccactgagggttctaccataaactacaccaccatcaattactacaaagactcttatgctgccacagcaggcaaacagagtctcaagcaggatccagacaagtttgcaaatcctgttaaagacatcttcactgaaatggcagcgccattgaagtccccatccgctgaggcatgtggatacagtgatcgagtggcacaattaactattggcaactccaccatcaccacgcaagaagcggctaacatcatagtcggttatggtgagtggccttcttactgctcagattctgacgctacagcagtggataaaccaacgcgcccggatgtttcagtgaataggttttacacgttagacactaaattatgggagaaatcgtccaagggatggtactggaagttcccggatgtgttaactgaaactggggtttttgggcaaaatgcacaattccactacctctaccgatcagggttctgcatccacgtgcagtgtaatgctagtaaattccaccaaggagcactcctagtcgctgtcctaccagagtatgtcattgggacagtagcaggcggcacagggacggaagatacccaccccccttataagcagacccaacccggtgccgatggcttcgagctgcagcacccgtacgtgcttgacgctggcatcccaatatcacagttaacagtgtgcccacaccagtggattaatttgaggaccaacaattgtgctacaataatagtgccatacattaacgcactgccttttgattctgccttgaaccattgcaactttggcctgctagttgtgcctattagtccactagactacgaccaaggagcgacgccagtaatccctataactatcacattggccccaatgtgttctgagttcgcaggtcttaggcaggcagtcacgcaagggttccctaccgagctaaaacctggcacaaatcaattcttaaccaccgatgatggtgtctcagcacctattctaccaaacttccaccccaccccgtgtatccacatacctggtgaagtgaggaatttgctagagttatgccaggtggaaaccattctggaggttaataatgtgcccacgaatgccactagcttgatggagagactgcgcttcccggtctcagcacaagcagggaaaggtgaactgtgtgcggtgtttagagccgatcctgggcgaaacggaccatggcaatccaccttactgggtcagttgtgcgggtactacacccaatggtcaggatcattggaggtcaccttcatgtttactggatccttcatggctaccggcaagatgctcatagcctatacaccgccaggaggtcctctgcccaaggaccgggcgaccgccatgttgggcacgcacgtcatctgggattttgggctgcaatcgtctgttacccttgtaataccatggatcagcaacactcattatagagcacatgcccgagatggagtgtttgactactacaccacagggttggtcagtatatggtatcagacaaattacgtggttccaattggtgcgcccaacacagcctatataatagcactagcggcagcccaaaagaacttcactatgaaattgtgcaaggatgctagtgatatcttgcagacgggcaccatccagggagatagggtggcagatgtaattgaaagctccataggagatagcgtgagcagagccctcactcacgctctaccagcacccacaggtcagaacacacaggtgagcagtcatcgactggatacgggcaaggttccagcactccaagctgctgaaattggagcatcatcaaatgctagtgacgagagtatgattgagacacgctgtgtcctcaactcgcacagtacagcagagaccactcttgatagtttcttcagcagggcgggattagttggagagatagatctccctcttgagggcacaactaacccaaatggttatgccaactgggacatagatataacaggttacgcgcaaatgcgtagaaaggtagagctcttcacctacatgcgctttgatgcagagttcacttttgttgcgtgtacacctaccggggaagttgttccacaactgctccaatatatgtttgtgccacctggagccccaaagccagattctagggaatcccttgcatggcaaaccgccactaacccctcagtttttgtcaagctgtcagaccctccagcacaggtttcagtgccattcatgtcacctgcgagtgcttatcaatggttttatgacggatatcccacgttcggagaacacaaacaggagaaagatcttgaatatggggcatgtcctaataacatgatgggcacgttctcagtgcggactgtagggtcctccaagtccaagtaccctctagtgattaggatttacatgagaatgaagcacgtcagggcgtggatacctcgcccgatgcgtaaccagaactacctattcaaagccaatccaaattatgctggcaactccgttaagccaactggtgccagtcgcacagcgatcaccactcttgggaaatttggacaacagtctggggctatttatgtgggcaactttagggtggtcaaccgacatcttgccactcacaatgattgggcaaatcttgtttgggaagacagctctcgcgacttgctcgtgtcatccactaccgcccaaggttgcgacacgattgcccgctgcgattgccagacaggggtgtactactgtaactcgatgagaaaacactacccagttagtttttcaaaacccagcctgatctatgtagaggctagcgagtattacccagccaggtaccaatcacatctcatgctcgcacagggtcactcagaacctggtgattgcggtggtatccttaggtgccaacatggcgtcgtcggcatagtgtccactggtggtaatgggcttgttggctttgcagacgtcagagacctcttgtggttagatgaagaagccatggaacagggcgtgtccgactacatcaagggtctcggggatgcttttggaacaggctttactgacgcagtctcaagggaggttgaagctctcaagaactatctcatagggtctgaaggagcagttgagaaaattttgaaaaatctaattaaactaatctctgcactggtgattgtgatcagaagtgattatgatatggttaccctcactgcgaccttggcgctgataggttgtcatggcagtccgtgggcttggatcaaagccaaaacagcctccatcttaggtatccctattgctcaaaagcagagcgcttcctggctcaagaagttcaatgatatggccaacgccgctaaggggttagagtgggtttccaacaagatcagcaaatttattgattggcttaaggagaagatagtaccagcagctagggagaaggttgaattcctaaataacttgaaacagctgccactgctagagaatcagatctcaaacttggaacaatctgctgcctcacaagaggaccttgaaatcatgtttgggaatgtatcgtacctagctcacttctgccgcaagttccaaccgctatacgccacggaagctaggagagtctatgccctggagaagaggatgaataactatatgcagttcaagagcaaacaccgaattgaacctgtatgtctcatcattaggggctcaccaggcactgggaagtctctagccactggtattattgctcgagcaatcgctgataagtaccactccagcgtgtactcgctcccaccagacccagatcattttgacggttacaagcaacaggtggttaccgtgatggatgatctgtgccaaaaccccgacggaaaggatatgtctttattctgtcaaatggtatccaccgtagacttcattccaccaatggcttccctcgaggagaagggagtttccttcacctctaagtttgtcatcgcatccactaatgccagtaatatcatagtaccaacagtgtctgattccgacgctattcgccgcaggttctacatggactgtgacattgaagtgacagactcatacaaaacagatctaggtagactggatgcagggcgagccgctaaactgtgctctgagaacaacactgcaaatttcaaacgttgtagcccgttagtgtgcgggaaagctatccaacttagagatagaaagtctaaagtcagatacagtgtggatacggtggtttcagaacttattagggaatacagcaataggtccgctattggcaacacaatcgaggctcttttccaaggtccacccaagttcaggccaattaggattagccttgaagaaaaaccagccccagacgctattagcgatctccttgctagcgtagatagtgaagaagtgcgccagtactgcagggatcaaggctggattattcctgaagttcccaccaatgtagagcggcaccttaatagagcggtgcttgtcatgcaatccatcgccacagtagtggcagttgtctcgttggtgtatgtcatctacaagctctttgcagggttccagggtgcgtattctggtgctcctaagcaagtgcttaagaaacctgcccttcgcacagcaacagtacagggcccgagccttgactttgctctctccctactgagaaggaacatcagacaagttcaaacagaccaggggcatttcaccatgttgggtgttagggatcgcttagcagtccttccacgtcactcacaacctggcaaaactatttgggttgaacacaaactcgtgaacgtccttgatgcagttgaactggtggatgagcaaggagtcaacctggaattgaccctcaggcaatggcagacagggtttttgcgcaggcctcaaaaggagttactttgctagtgaacaaggagagatccaatgggttaagcccaacaaagaaactggaagactcaacattaatggaccaacccgcaccaaattagaacctagtgtattccatgacatcttcgagggaaataaagagccagctgtcttgcacagtaaagacccccgacttgaagtagattttgaacaggccctgttctctaagtatgtgggaaacacactacatgagcctgacgagtacatcaaagaggcggctcttcattacgcgaaccaattgaagcaattagaaattaatacctctcaaatgagcatggaagaggcctgctacggtactgagaatcttgaggctattgatcttcacactagtgcaggatacccttatagtgccttggggataaagaaaagagacatcttagaccctaccaccagggacgtgagtaaaatgaagttctacatggacaagtatggtcttgatcttccttactccacttatgtcaaggacgagctacgctcgattgataaaattaagaaagggaagtcccgtctgatcgaggctagtagtctaaatgattcagtgtacctcagaatggctttcggacatttgtatgaggctttccacgcaaatcctgggacaataactggatcagccgtggggtgtaaccctgacacattctggagcaagctgccaattttgctccctggttcactctttgctttcgactactcaggttatgatgccagccttagccctgtctggttcagagcattagaattagttctcagggagatagggtatagtgaagaggcggtctcactcattgagggaatcaaccacacacaccatgtgtatcgtaataagacctattgtgtgcttggtgggatgccctcaggttgttcgggaacatccattttcaactcaatgatcaacaacattatcatcagagcactgctcataaaaacatttaagggcattgacttggatgaactcaacatggtcgcttatggagacgatgtgctcgctagctatcccttcccaattgattgcttggaactagcaaagactggtaaggagtatggtttgaccatgactcctgctgataaatctccttgcttcaatgaggttaattggggtaatgcgaccttccttaaaaggggctttttgcccgatgaacagtttccgttcttgattcaccccactatgccaatgagggagatccatgagtccattcgatggaccaaggacgcccgaaacactcaagatcatgtgcggtccttgtgcctcctagcatggcataatggtaaacaagaatatgagaagtttgtgagcacaattaggtctgttccagtgggaagagcgttggctattccaaattatgaaaaccttagacgcaattggctcgagttattttagaggttatacacacctcaaccccaccagaaatctggtcgtgaatgtgactggtgggggtaaatttgttataaccagaatagcaaaaaaaaaaaaaaaaaaaaaaaaa

SEQ ID NO: 11 - DNA, 7164 bp, Artificial Sequence
  Synthetic sequence
ttaaaacagcctgtgggttgcacccacccacagggcccactgggcgcaagcactctggtaccccggtacctttgtgtgcctgttttatacccccccccccaatgaaacttagaagcagcaaaccacgatcaatagtaggcataacgctccagttatgtcttgatcaagcacttctgtttccccggactgagtatcaatagactgctcgcgcggttgaaggagaaaacgttcgttatccggctagctacttcggaaaacctagtaacaccatgaaagttgcggagagcttcgttcagcactcccccagtgtagatcaggtcgatgagtcaccgcattccccacgggcgaccgtggcggtggctgcgttggcggcctgcccatggggtaacccatggggcgctctaatacggacatggtgtgaagagtctactgagctagttagtagtcctccggcccctgaatgcggctaatcccaactgcggagcacacgcccacaagccagcgggtagtgtgtcgtaacgggtaactctgcagcggaaccgactactttgggtgtccgtgtttccttttatctttatattggctgcttatggtgacaattaaagaattgttaccatatagctattggattggccatccggtgtgcaacagagcaattatttaccaatttgttggttttgtaccattaaccttgaattctgtgaccacccttaattatattttgacccttaacgcagctaaacatgggttcgcaagtgtctacacagcgctccggttctcatgaaaactcaaactcagccactgagggttctaccataaactacaccaccatcaattactacaaagactcttatgctgccacagcaggcaaacagagtctcaagcaggatccagacaagtttgcaaatcctgttaaagacatcttcactgaaatggcagcgccattgaagtccccatccgctgaggcatgtggatacagtgatcgagtggcacaattaactattggcaactccaccatcaccacgcaagaagcggctaacatcatagtcggttatggtgagtggccttcttactgctcagattctgacgctacagcagtggataaaccaacgcgcccggatgtttcagtgaataggttttacacgttagacactaaattatgggagaaatcgtccaagggatggtactggaagttcccggatgtgttaactgaaactggggtttttgggcaaaatgcacaattccactacctctaccgatcagggttctgcatccacgtgcagtgtaatgctagtaaattccaccaaggagcactcctagtcgctgtcctaccagagtatgtcattgggacagtagcaggcggcacagggacggaagatacccaccccccttataagcagacccaacccggtgccgatggcttcgagctgcagcacccgtacgtgcttgacgctggcatcccaatatcacagttaacagtgtgcccacaccagtggattaatttgaggaccaacaattgtgctacaataatagtgccatacattaacgcactgccttttgattctgccttgaaccattgcaactttggcctgctagttgtgcctattagtccactagactacgaccaaggagcgacgccagtaatccctataactatcacattggccccaatgtgttctgagttcgcaggtcttaggcaggcagtcacgcaagggttccctaccgagctaaaacctggcacaaatcaattcttaaccaccgatgatggtgtctcagcacctattctaccaaacttccaccccaccccgtgtatccacatacctggtgaagtgaggaatttgctagagttatgccaggtggaaaccattctggaggttaataatgtgcccacgaatgccactagcttgatggagagactgcgcttcccggtctcagcacaagcagggaaaggtgaactgtgtgcggtgtttagagccgatcctgggcgaaacggaccatggcaatccaccttactgggtcagttgtgcgggtactacacccaatggtcaggatcattggaggtcaccttcatgtttactggatccttcatggctaccggcaagatgctcatagcctatacaccgccaggaggtcctctgcccaaggaccgggcgaccgccatgttgggcacgcacgtcatctgggattttgggctgcaatcgtctgttacccttgtaataccatggatcagcaacactcattatagagcacatgcccgagatggagtgtttgactactacaccacagggttggtcagtatatggtatcagacaaattacgtggttccaattggtgcgcccaacacagcctatataatagcactagcggcagcccaaaagaacttcactatgaaattgtgcaaggatgctagtgatatcttgcagacgggcaccatccagggagatagggtggcagatgtaattgaaagctccataggagatagcgtgagcagagccctcactcacgctctaccagcacccacaggtcagaacacacaggtgagcagtcatcgactggatacgggcaaggttccagcactccaagctgctgaaattggagcatcatcaaatgctagtgacgagagtatgattgagacacgctgtgtcctcaactcgcacagtacagcagagaccactcttgatagtttcttcagcagggcgggattagttggagagatagatctccctcttgagggcacaactaacccaaatggttatgccaactgggacatagatataacaggttacgcgcaaatgcgtagaaaggtagagctcttcacctacatgcgctttgatgcagagttcacttttgttgcgtgtacacctaccggggaagttgttccacaactgctccaatatatgtttgtgccacctggagccccaaagccagattctagggaatcccttgcatggcaaaccgccactaacccctcagtttttgtcaagctgtcagaccctccagcacaggtttcagtgccattcatgtcacctgcgagtgcttatcaatggttttatgacggatatcccacgttcggagaacacaaacaggagaaagatcttgaatatggggcatgtcctaataacatgatgggcacgttctcagtgcggactgtagggtcctccaagtccaagtaccctctagtgattaggatttacatgagaatgaagcacgtcagggcgtggatacctcgcccgatgcgtaaccagaactacctattcaaagccaatccaaattatgctggcaactccgttaagccaactggtgccagtcgcacagcgatcaccactcttgggaaatttggacaacagtctggggctatttatgtgggcaactttagggtggtcaaccgacatcttgccactcacaatgattgggcaaatcttgtttgggaagacagctctcgcgacttgctcgtgtcatccactaccgcccaaggttgcgacacgattgcccgctgcgattgccagacaggggtgtactactgtaactcgatgagaaaacactacccagttagtttttcaaaacccagcctgatctatgtagaggctagcgagtattacccagccaggtaccaatcacatctcatgctcgcacagggtcactcagaacctggtgattgcggtggtatccttaggtgccaacatggcgtcgtcggcatagtgtccactggtggtaatgggcttgttggctttgcagacgtcagagacctcttgtggttagatgaagaagccatggaacagggcgtgtccgactacatcaagggtctcggggatgcttttggaacaggctttactgacgcagtctcaagggaggttgaagctctcaagaactatctcatagggtctgaaggagcagttgagaaaattttgaaaaatctaattaaactaatctctgcactggtgattgtgatcagaagtgattatgatatggttaccctcactgcgaccttggcgctgataggttgtcatggcagtccgtgggcttggatcaaagccaaaacagcctccatcttaggtatccctattgctcaaaagcagagcgcttcctggctcaagaagttcaatgatatggccaacgccgctaaggggttagagtgggtttccaacaagatcagcaaatttattgattggcttaaggagaagatagtaccagcagctagggagaaggttgaattcctaaataacttgaaacagctgccactgctagagaatcagatctcaaacttggaacaatctgctgcctcacaagaggaccttgaaatcatgtttgggaatgtatcgtacctagctcacttctgccgcaagttccaaccgctatacgccacggaagctaggagagtctatgccctggagaagaggatgaataactatatgcagttcaagagcaaacaccgaattgaacctgtatgtctcatcattaggggctcaccaggcactgggaagtctctagccactggtattattgctcgagcaatcgctgataagtaccactccagcgtgtactcgctcccaccagacccagatcattttgacggttacaagcaacaggtggttaccgtgatggatgatctgtgccaaaaccccgacggaaaggatatgtctttattctgtcaaatggtatccaccgtagacttcattccaccaatggcttccctcgaggagaagggagtttccttcacctctaagtttgtcatcgcatccactaatgccagtaatatcatagtaccaacagtgtctgattccgacgctattcgccgcaggttctacatggactgtgacattgaagtgacagactcatacaaaacagatctaggtagactggatgcagggcgagccgctaaactgtgctctgagaacaacactgcaaatttcaaacgttgtagcccgttagtgtgcgggaaagctatccaacttagagatagaaagtctaaagtcagatacagtgtggatacggtggtttcagaacttattagggaatacagcaataggtccgctattggcaacacaatcgaggctcttttccaaggtccacccaagttcaggccaattaggattagccttgaagaaaaaccagccccagacgctattagcgatctccttgctagcgtagatagtgaagaagtgcgccagtactgcagggatcaaggctggattattcctgaagttcccaccaatgtagagcggcaccttaatagagcggtgcttgtcatgcaatccatcgccacagtagtggcagttgtctcgttggtgtatgtcatctacaagctctttgcagggttccagggtgcgtattctggtgctcctaagcaagtgcttaagaaacctgcccttcgcacagcaacagtacagggcccgagccttgactttgctctctccctactgagaaggaacatcagacaagttcaaacagaccaggggcatttcaccatgttgggtgttagggatcgcttagcagtccttccacgtcactcacaacctggcaaaactatttgggttgaacacaaactcgtgaacgtccttgatgcagttgaactggtggatgagcaaggagtcaacctggaattgaccctcagcaatggcagacagggtttttgcgcaggcctcaaaaggagttactttgctagtgaacaaggagagatccaatgggttaagcccaacaaagaaactggaagactcaacattaatggaccaacccgcaccaaattagaacctagtgtattccatgacatcttcgagggaaataaagagccagctgtcttgcacagtaaagacccccgacttgaagtagattttgaacaggccctgttctctaagtatgtgggaaacacactacatgagcctgacgagtacatcaaagaggcggctcttcattacgcgaaccaattgaagcaattagaaattaatacctctcaaatgagcatggaagaggcctgctacggtactgagaatcttgaggctattgatcttcacactagtgcaggatacccttatagtgccttggggataaagaaaagagacatcttagaccctaccaccagggacgtgagtaaaatgaagttctacatggacaagtatggtcttgatcttccttactccacttatgtcaaggacgagctacgctcgattgataaaattaagaaagggaagtcccgtctgatcgaggctagtagtctaaatgattcagtgtacctcagaatggctttcggacatttgtatgaggctttccacgcaaatcctgggacaataactggatcagccgtggggtgtaaccctgacacattctggagcaagctgccaattttgctccctggttcactctttgctttcgactactcaggttatgatgccagccttagccctgtctggttcagagcattagaattagttctcagggagatagggtatagtgaagaggcggtctcactcattgagggaatcaaccacacacaccatgtgtatcgtaataagacctattgtgtgcttggtgggatgccctcaggttgttcgggaacatccattttcaactcaatgatcaacaacattatcatcagagcactgctcataaaaacatttaagggcattgacttggatgaactcaacatggtcgcttatggagacgatgtgctcgctagctatcccttcccaattgattgcttggaactagcaaagactggtaaggagtatggtttgaccatgactcctgctgataaatctccttgcttcaatgaggttaattggggtaatgcgaccttccttaaaaggggctttttgcccgatgaacagtttccgttcttgattcaccccactatgccaatgagggagatccatgagtccattcgatggaccaaggacgcccgaaacactcaagatcatgtgcggtccttgtgcctcctagcatggcataatggtaaacaagaatatgagaagtttgtgagcacaattaggtctgttccagtgggaagagcgttggctattccaaattatgaaaaccttagacgcaattggctcgagttattttagaggttatacacacctcaaccccaccagaaatctggtcgtgaatgtgactggtgggggtaaatttgttataaccagaatagcaaaaaaaaaaaaaaaaaaaaaaaaa

SEQ ID NO: 12 - DNA, 7356 bp, Artificial Sequence
  Synthetic sequence
ttaaaacagcctgtgggttgcacccacccacagggcccactgggcgcaagcactctggtaccccggtacctttgtgtgcctgttttatacccccccccccaatgaaacttagaagcagcaaaccacgatcaatagtaggcataacgctccagttatgtcttgatcaagcacttctgtttccccggactgagtatcaatagactgctcgcgcggttgaaggagaaaacgttcgttatccggctagctacttcggaaaacctagtaacaccatgaaagttgcggagagcttcgttcagcactcccccagtgtagatcaggtcgatgagtcaccgcattccccacgggcgaccgtggcggtggctgcgttggcggcctgcccatggggtaacccatggggcgctctaatacggacatggtgtgaagagtctactgagctagttagtagtcctccggcccctgaatgcggctaatcccaactgcggagcacacgcccacaagccagcgggtagtgtgtcgtaacgggtaactctgcagcggaaccgactactttgggtgtccgtgtttccttttatctttatattggctgcttatggtgacaattaaagaattgttaccatatagctattggattggccatccggtgtgcaacagagcaattatttaccaatttgttggttttgtaccattaaccttgaattctgtgaccacccttaattatattttgacccttaacgcagctaaacatgggttcgcaagtgtctacacagcgctccggttctcatgaaaactcaaactcagccactgagggttctaccataaactacaccaccatcaattactacaaagactcttatgctgccacagcaggcaaacagagtctcaagcaggatccagacaagtttgcaaatcctgttaaagacatcttcactgaaatggcagcgccattgaagtccccatccgctgaggcatgtggatacagtgatcgagtggcacaattaactattggcaactccaccatcaccacgcaagaagcggctaacatcatagtcggttatggtgagtggccttcttactgctcagattctgacgctacagcagtggataaaccaacgcgcccggatgtttcagtgaataggttttacacgttagacactaaattatgggagaaatcgtccaagggatggtactggaagttcccggatgtgttaactgaaactggggtttttgggcaaaatgcacaattccactacctctaccgatcagggttctgcatccacgtgcagtgtaatgctagtaaattccaccaaggagcactcctagtcgctgtcctaccagagtatgtcattgggacagtagcaggcggcacagggacggaagatacccaccccccttataagcagacccaacccggtgccgatggcttcgagctgcagcacccgtacgtgcttgacgctggcatcccaatatcacagttaacagtgtgcccacaccagtggattaatttgaggaccaacaattgtgctacaataatagtgccatacattaacgcactgccttttgattctgccttgaaccattgcaactttggcctgctagttgtgcctattagtccactagactacgaccaaggagcgacgccagtaatccctataactatcacattggccccaatgtgttctgagttcgcaggtcttaggcaggcagtcacgcaagggttccctaccgagctaaaacctggcacaaatcaattcttaaccaccgatgatggtgtctcagcacctattctaccaaacttccaccccaccccgtgtatccacatacctggtgaagtgaggaatttgctagagttatgccaggtggaaaccattctggaggttaataatgtgcccacgaatgccactagcttgatggagagactgcgcttcccggtctcagcacaagcagggaaaggtgaactgtgtgcggtgtttagagccgatcctgggcgaaacggaccatggcaatccaccttactgggtcagttgtgcgggtactacacccaatggtcaggatcattggaggtcaccttcatgtttactggatccttcatggctaccggcaagatgctcatagcctatacaccgccaggaggtcctctgcccaaggaccgggcgaccgccatgttgggcacgcacgtcatctgggattttgggctgcaatcgtctgttacccttgtaataccatggatcagcaacactcattatagagcacatgcccgagatggagtgtttgactactacaccacagggttggtcagtatatggtatcagacaaattacgtggttccaattggtgcgcccaacacagcctatataatagcactagcggcagcccaaaagaacttcactatgaaattgtgcaaggatgctagtgatatcttgcagacgggcaccatccagggagatagggtggcagatgtaattgaaagctccataggagatagcgtgagcagagccctcactcacgctctaccagcacccacaggtcagaacacacaggtgagcagtcatcgactggatacgggcaaggttccagcactccaagctgctgaaattggagcatcatcaaatgctagtgacgagagtatgattgagacacgctgtgtcctcaactcgcacagtacagcagagaccactcttgatagtttcttcagcagggcgggattagttggagagatagatctccctcttgagggcacaactaacccaaatggttatgccaactgggacatagatataacaggttacgcgcaaatgcgtagaaaggtagagctcttcacctacatgcgctttgatgcagagttcacttttgttgcgtgtacacctaccggggaagttgttccacaactgctccaatatatgtttgtgccacctggagccccaaagccagattctagggaatcccttgcatggcaaaccgccactaacccctcagtttttgtcaagctgtcagaccctccagcacaggtttcagtgccattcatgtcacctgcgagtgcttatcaatggttttatgacggatatcccacgttcggagaacacaaacaggagaaagatcttgaatatggggcatgtcctaataacatgatgggcacgttctcagtgcggactgtagggtcctccaagtccaagtaccctctagtgattaggatttacatgagaatgaagcacgtcagggcgtggatacctcgcccgatgcgtaaccagaactacctattcaaagccaatccaaattatgctggcaactccgttaagccaactggtgccagtcgcacagcgatcaccactcttgggaaatttggacaacagtctggggctatttatgtgggcaactttagggtggtcaaccgacatcttgccactcacaatgattgggcaaatcttgtttgggaagacagctctcgcgacttgctcgtgtcatccactaccgcccaaggttgcgacacgattgcccgctgcgattgccagacaggggtgtactactgtaactcgatgagaaaacactacccagttagtttttcaaaacccagcctgatctatgtagaggctagcgagtattacccagccaggtaccaatcacatctcatgctcgcacagggtcactcagaacctggtgattgcggtggtatccttaggtgccaacatggcgtcgtcggcatagtgtccactggtggtaatgggcttgttggctttgcagacgtcagagacctcttgtggttagatgaagaagccatggaacagggcgtgtccgactacatcaagggtctcggggatgcttttggaacaggctttactgacgcagtctcaagggaggttgaagctctcaagaactatctcatagggtctgaaggagcagttgagaaaattttgaaaaatctaattaaactaatctctgcactggtgattgtgatcagaagtgattatgatatggttaccctcactgcgaccttggcgctgataggttgtcatggcagtccgtgggcttggatcaaagccaaaacagcctccatcttaggtatccctattgctcaaaagcagagcgcttcctggctcaagaagttcaatgatatggccaacgccgctaaggggttagagtgggtttccaacaagatcagcaaatttattgattggcttaaggagaagatagtaccagcagctagggagaaggttgaattcctaaataacttgaaacagctgccactgctagagaatcagatctcaaacttggaacaatctgctgcctcacaagaggaccttgaaatcatgtttgggaatgtatcgtacctagctcacttctgccgcaagttccaaccgctatacgccacggaagctaggagagtctatgccctggagaagaggatgaataactatatgcagttcaagagcaaacaccgaattgaacctgtatgtctcatcattaggggctcaccaggcactgggaagtctctagccactggtattattgctcgagcaatcgctgataagtaccactccagcgtgtactcgctcccaccagacccagatcattttgacggttacaagcaacaggtggttaccgtgatggatgatctgtgccaaaaccccgacggaaaggatatgtctttattctgtcaaatggtatccaccgtagacttcattccaccaatggcttccctcgaggagaagggagtttccttcacctctaagtttgtcatcgcatccactaatgccagtaatatcatagtaccaacagtgtctgattccgacgctattcgccgcaggttctacatggactgtgacattgaagtgacagactcatacaaaacagatctaggtagactggatgcagggcgagccgctaaactgtgctctgagaacaacactgcaaatttcaaacgttgtagcccgttagtgtgcgggaaagctatccaacttagagatagaaagtctaaagtcagatacagtgtggatacggtggtttcagaacttattagggaatacagcaataggtccgctattggcaacacaatcgaggctcttttccaaggtccacccaagttcaggccaattaggattagccttgaagaaaaaccagccccagacgctattagcgatctccttgctagcgtagatagtgaagaagtgcgccagtactgcagggatcaaggctggattattcctgaagttcccaccaatgtagagcggcaccttaatagagcggtgcttgtcatgcaatccatcgccacagtagtggcagttgtctcgttggtgtatgtcatctacaagctctttgcagggttccagggtgcgtattctggtgctcctaagcaagtgcttaagaaacctgcccttcgcacagcaacagtacagggcccgagccttgactttgctctctccctactgagaaggaacatcagacaagttcaaacagaccaggggcatttcaccatgttgggtgttagggatcgcttagcagtccttccacgtcactcacaacctggcaaaactatttgggttgaacacaaactcgtgaacgtccttgatgcagttgaactggtggatgagcaaggagtcaacctggaattgaccctcattactcttgacaccaacgagaagtttagggatattaccaagttcatcccggaaaatattagcactgctagtgatgccaccctagtgatcaacacggagcatatgccatcaatgtttgtcccggtgggtgacgttgtgcagtgtggaggagtagtgacatctgttgggaaggttgtcggtattcacattggtggcaatggcagacagggtttttgcgcaggcctcaaaaggagttactttgctagtgaacaaggagagatccaatgggttaagcccaacaaagaaactggaagactcaacattaatggaccaacccgcaccaaattagaacctagtgtattccatgacatcttcgagggaaataaagagccagctgtcttgcacagtaaagacccccgacttgaagtagattttgaacaggccctgttctctaagtatgtgggaaacacactacatgagcctgacgagtacatcaaagaggcggctcttcattacgcgaaccaattgaagcaattagaaattaatacctctcaaatgagcatggaagaggcctgctacggtactgagaatcttgaggctattgatcttcacactagtgcaggatacccttatagtgccttggggataaagaaaagagacatcttagaccctaccaccagggacgtgagtaaaatgaagttctacatggacaagtatggtcttgatcttccttactccacttatgtcaaggacgagctacgctcgattgataaaattaagaaagggaagtcccgtctgatcgaggctagtagtctaaatgattcagtgtacctcagaatggctttcggacatttgtatgaggctttccacgcaaatcctgggacaataactggatcagccgtggggtgtaaccctgacacattctggagcaagctgccaattttgctccctggttcactctttgctttcgactactcaggttatgatgccagccttagccctgtctggttcagagcattagaattagttctcagggagatagggtatagtgaagaggcggtctcactcattgagggaatcaaccacacacaccatgtgtatcgtaataagacctattgtgtgcttggtgggatgccctcaggttgttcgggaacatccattttcaactcaatgatcaacaacattatcatcagagcactgctcataaaaacatttaagggcattgacttggatgaactcaacatggtcgcttatggagacgatgtgctcgctagctatcccttcccaattgattgcttggaactagcaaagactggtaaggagtatggtttgaccatgactcctgctgataaatctccttgcttcaatgaggttaattggggtaatgcgaccttccttaaaaggggctttttgcccgatgaacagtttccgttcttgattcaccccactatgccaatgagggagatccatgagtccattcgatggaccaaggacgcccgaaacactcaagatcatgtgcggtccttgtgcctcctagcatggcataatggtaaacaagaatatgagaagtttgtgagcacaattaggtctgttccagtgggaagagcgttggctattccaaattatgaaaaccttagacgcaattggctcgagttattttagaggttatacacacctcaaccccaccagaaatctggtcgtgaatgtgactggtgggggtaaatttgttataaccagaatagcaaaaaaaaaaaaaaaaaaaaaaaaa

SEQ ID NO: 13 - DNA, 7397 bp, Artificial Sequence
  Synthetic sequence
ttaaaacagcctgtgggttgcacccacccacagggcccactgggcgcaagcactctggtaccccggtacctttgtgtgcctgttttatacccccccccccaatgaaacttagaagcagcaaaccacgatcaatagtaggcataacgctccagttatgtcttgatcaagcacttctgtttccccggactgagtatcaatagactgctcgcgcggttgaaggagaaaacgttcgttatccggctagctacttcggaaaacctagtaacaccatgaaagttgcggagagcttcgttcagcactcccccagtgtagatcaggtcgatgagtcaccgcattccccacgggcgaccgtggcggtggctgcgttggcggcctgcccatggggtaacccatggggcgctctaatacggacatggtgtgaagagtctactgagctagttagtagtcctccggcccctgaatgcggctaatcccaactgcggagcacacgcccacaagccagcgggtagtgtgtcgtaacgggtaactctgcagcggaaccgactactttgggtgtccgtgtttccttttatctttatattggctgcttatggtgacaattaaagaattgttaccatatagctattggattggccatccggtgtgcaacagagcaattatttaccaatttgttggttttgtaccattaaccttgaattctgtgaccacccttaattatattttgacccttaacgcagctaaacatgggttcgcaagtgtctacacagcgctccggttctcatgaaaactcaaactcagccactgagggttctaccataaactacaccaccatcaattactacaaagactcttatgctgccacagcaggcaaacagagtctcaagcaggatccagacaagtttgcaaatcctgttaaagacatcttcactgaaatggcagcgccattgaagtccccatccgctgaggcatgtggatacagtgatcgagtggcacaattaactattggcaactccaccatcaccacgcaagaagcggctaacatcatagtcggttatggtgagtggccttcttactgctcagattctgacgctacagcagtggataaaccaacgcgcccggatgtttcagtgaataggttttacacgttagacactaaattatgggagaaatcgtccaagggatggtactggaagttcccggatgtgttaactgaaactggggtttttgggcaaaatgcacaattccactacctctaccgatcagggttctgcatccacgtgcagtgtaatgctagtaaattccaccaaggagcactcctagtcgctgtcctaccagagtatgtcattgggacagtagcaggcggcacagggacggaagatacccaccccccttataagcagacccaacccggtgccgatggcttcgagctgcagcacccgtacgtgcttgacgctggcatcccaatatcacagttaacagtgtgcccacaccagtggattaatttgaggaccaacaattgtgctacaataatagtgccatacattaacgcactgccttttgattctgccttgaaccattgcaactttggcctgctagttgtgcctattagtccactagactacgaccaaggagcgacgccagtaatccctataactatcacattggccccaatgtgttctgagttcgcaggtcttaggcaggcagtcacgcaagggttccctaccgagctaaaacctggcacaaatcaattcttaaccaccgatgatggtgtctcagcacctattctaccaaacttccaccccaccccgtgtatccacatacctggtgaagtgaggaatttgctagagttatgccaggtggaaaccattctggaggttaataatgtgcccacgaatgccactagcttgatggagagactgcgcttcccggtctcagcacaagcagggaaaggtgaactgtgtgcggtgtttagagccgatcctgggcgaaacggaccatggcaatccaccttactgggtcagttgtgcgggtactacacccaatggtcaggatcattggaggtcaccttcatgtttactggatccttcatggctaccggcaagatgctcatagcctatacaccgccaggaggtcctctgcccaaggaccgggcgaccgccatgttgggcacgcacgtcatctgggattttgggctgcaatcgtctgttacccttgtaataccatggatcagcaacactcattatagagcacatgcccgagatggagtgtttgactactacaccacagggttggtcagtatatggtatcagacaaattacgtggttccaattggtgcgcccaacacagcctatataatagcactagcggcagcccaaaagaacttcactatgaaattgtgcaaggatgctagtgatatcttgcagacgggcaccatccagggagatagggtggcagatgtaattgaaagctccataggagatagcgtgagcagagccctcactcacgctctaccagcacccacaggtcagaacacacaggtgagcagtcatcgactggatacgggcaaggttccagcactccaagctgctgaaattggagcatcatcaaatgctagtgacgagagtatgattgagacacgctgtgtcctcaactcgcacagtacagcagagaccactcttgatagtttcttcagcagggcgggattagttggagagatagatctccctcttgagggcacaactaacccaaatggttatgccaactgggacatagatataacaggttacgcgcaaatgcgtagaaaggtagagctcttcacctacatgcgctttgatgcagagttcacttttgttgcgtgtacacctaccggggaagttgttccacaactgctccaatatatgtttgtgccacctggagccccaaagccagattctagggaatcccttgcatggcaaaccgccactaacccctcagtttttgtcaagctgtcagaccctccagcacaggtttcagtgccattcatgtcacctgcgagtgcttatcaatggttttatgacggatatcccacgttcggagaacacaaacaggagaaagatcttgaatatggggcatgtcctaataacatgatgggcacgttctcagtgcggactgtagggtcctccaagtccaagtaccctctagtgattaggatttacatgagaatgaagcacgtcagggcgtggatacctcgcccgatgcgtaaccagaactacctattcaaagccaatccaaattatgctggcaactccgttaagccaactggtgccagtcgcacagcgatcaccactcttgggaaatttggacaacagtctggggctatttatgtgggcaactttagggtggtcaaccgacatcttgccactcacaatgattgggcaaatcttgtttgggaagacagctctcgcgacttgctcgtgtcatccactaccgcccaaggttgcgacacgattgcccgctgcgattgccagacaggggtgtactactgtaactcgatgagaaaacactacccagttagtttttcaaaacccagcctgatctatgtagaggctagcgagtattacccagccaggtaccaatcacatctcatgctcgcacagggtcactcagaacctggtgattgcggtggtatccttaggtgccaacatggcgtcgtcggcatagtgtccactggtggtaatgggcttgttggctttgcagacgtcagagacctcttgtggttagatgaagaagccatggaacagggcgtgtccgactacatcaagggtctcggggatgcttttggaacaggctttactgacgcagtctcaagggaggttgaagctctcaagaactatctcatagggtctgaaggagcagttgagaaaattttgaaaaatctaattaaactaatctctgcactggtgattgtgatcagaagtgattatgatatggttaccctcactgcgaccttggcgctgataggttgtcatggcagtccgtgggcttggatcaaagccaaaacagcctccatcttaggtatccctattgctcaaaagcagagcgcttcctggctcaagaagttcaatgatatggccaacgccgctaaggggttagagtgggtttccaacaagatcagcaaatttattgattggcttaaggagaagatagtaccagcagctagggagaaggttgaattcctaaataacttgaaacagctgccactgctagagaatcagatctcaaacttggaacaatctgctgcctcacaagaggaccttgaaatcatgtttgggaatgtatcgtacctagctcacttctgccgcaagttccaaccgctatacgccacggaagctaggagagtctatgccctggagaagaggatgaataactatatgcagttcaagagcaaacaccgaattgaacctgtatgtctcatcattaggggctcaccaggcactgggaagtctctagccactggtattattgctcgagcaatcgctgataagtaccactccagcgtgtactcgctcccaccagacccagatcattttgacggttacaagcaacaggtggttaccgtgatggatgatctgtgccaaaaccccgacggaaaggatatgtctttattctgtcaaatggtatccaccgtagacttcattccaccaatggcttccctcgaggagaagggagtttccttcacctctaagtttgtcatcgcatccactaatgccagtaatatcatagtaccaacagtgtctgattccgacgctattcgccgcaggttctacatggactgtgacattgaagtgacagactcatacaaaacagatctaggtagactggatgcagggcgagccgctaaactgtgctctgagaacaacactgcaaatttcaaacgttgtagcccgttagtgtgcgggaaagctatccaacttagagatagaaagtctaaagtcagatacagtgtggatacggtggtttcagaacttattagggaatacagcaataggtccgctattggcaacacaatcgaggctcttttccaaggtccacccaagttcaggccaattaggattagccttgaagaaaaaccagccccagacgctattagcgatctccttgctagcgtagatagtgaagaagtgcgccagtactgcagggatcaaggctggattattcctgaagttcccaccaatgtagagcggcaccttaatagagcggtgcttgtcatgcaatccatcgccacagtagtggcagttgtctcgttggtgtatgtcatctacaagctctttgcagggttccagggtgcgtattctggtgctcctaagcaagtgcttaagaaacctgcccttcgcacagcaacagtacagggcccgagccttgactttgctctctccctactgagaaggaacatcagacaagttcaaacagaccaggggcatttcaccatgttgggtgttagggatcgcttagcagtccttccacgtcactcacaacctggcaaaactatttgggttgaacacaaactcgtgaacgtccttgatgcagttgaactggtggatgagcaaggagtcaacctggaattgaccctcattactcttgacaccaacgagaagtttagggatattaccaagttcatcccggaaaatattagcactgctagtgatgccaccctagtgatcaacacggagcatatgccatcaatgtttgtcccggtgggtgacgttgtgcagtatggctttttgaatctcagtggtaagcctacccatcgcaccatgatgtacaactttcctactaaagcagggcagtgtggaggagtagtgacatctgttgggaaggttgtcggtattcacattggtggcaatggcagacagggtttttgcgcaggcctcaaaaggagttactttgctagtgaacaaggagagatccaatgggttaagcccaacaaagaaactggaagactcaacattaatggaccaacccgcaccaaattagaacctagtgtattccatgacatcttcgagggaaataaagagccagctgtcttgcacagtaaagacccccgacttgaagtagattttgaacaggccctgttctctaagtatgtgggaaacacactacatgagcctgacgagtacatcaaagaggcggctcttcattacgcgaaccaattgaagcaattagaaattaatacctctcaaatgagcatggaagaggcctgctacggtactgagaatcttgaggctattgatcttcacactagtgcaggatacccttatagtgccttggggataaagaaaagagaatgaagttctacatggacaagtatggtcttgatcttccttactccacttatgtcaaggacgagctacgctcgattgataaaattaagaaagggaagtcccgtctgatcgaggctagtagtctaaatgattcagtgtacctcagaatggctttcggacatttgtatgaggctttccacgcaaatcctgggacaataactggatcagccgtggggtgtaaccctgacacattctggagcaagctgccaattttgctccctggttcactctttgctttcgactactcaggttatgatgccagccttagccctgtctggttcagagcattagaattagttctcagggagatagggtatagtgaagaggcggtctcactcattgagggaatcaaccacacacaccatgtgtatcgtaataagacctattgtgtgcttggtgggatgccctcaggttgttcgggaacatccattttcaactcaatgatcaacaacattatcatcagagcactgctcataaaaacatttaagggcattgacttggatgaactcaacatggtcgcttatggagacgatgtgctcgctagctatcccttcccaattgattgcttggaactagcaaagactggtaaggagtatggtttgaccatgactcctgctgataaatctccttgcttcaatgaggttaattggggtaatgcgaccttccttaaaaggggctttttgcccgatgaacagtttccgttcttgattcaccccactatgccaatgagggagatccatgagtccattcgatggaccaaggacgcccgaaacactcaagatcatgtgcggtccttgtgcctcctagcatggcataatggtaaacaagaatatgagaagtttgtgagcacaattaggtctgttccagtgggaagagcgttggctattccaaattatgaaaaccttagacgcaattggctcgagttattttagaggttatacacacctcaaccccaccagaaatctggtcgtgaatgtgactggtgggggtaaatttgttataaccagaatagcaaaaaaaaaaaaaaaaaaaaaaaaa

SEQ ID NO: 14 - DNA, 7395 bp, Artificial Sequence
  Synthetic sequence
ttaaaacagcctgtgggttgcacccacccacagggcccactgggcgcaagcactctggtaccccggtacctttgtgtgcctgttttatacccccccccccaatgaaacttagaagcagcaaaccacgatcaatagtaggcataacgctccagttatgtcttgatcaagcacttctgtttccccggactgagtatcaatagactgctcgcgcggttgaaggagaaaacgttcgttatccggctagctacttcggaaaacctagtaacaccatgaaagttgcggagagcttcgttcagcactcccccagtgtagatcaggtcgatgagtcaccgcattccccacgggcgaccgtggcggtggctgcgttggcggcctgcccatggggtaacccatggggcgctctaatacggacatggtgtgaagagtctactgagctagttagtagtcctccggcccctgaatgcggctaatcccaactgcggagcacacgcccacaagccagcgggtagtgtgtcgtaacgggtaactctgcagcggaaccgactactttgggtgtccgtgtttccttttatctttatattggctgcttatggtgacaattaaagaattgttaccatatagctattggattggccatccggtgtgcaacagagcaattatttaccaatttgttggttttgtaccattaaccttgaattctgtgaccacccttaattatattttgacccttaacgcagctaaacatgggttcgcaagtgtctacacagcgctccggttctcatgaaaactcaaactcagccactgagggttctaccataaactacaccaccatcaattactacaaagactcttatgctgccacagcaggcaaacagagtctcaagcaggatccagacaagtttgcaaatcctgttaaagacatcttcactgaaatggcagcgccattgaagtccccatccgctgaggcatgtggatacagtgatcgagtggcacaattaactattggcaactccaccatcaccacgcaagaagcggctaacatcatagtcggttatggtgagtggccttcttactgctcagattctgacgctacagcagtggataaaccaacgcgcccggatgtttcagtgaataggttttacacgttagacactaaattatgggagaaatcgtccaagggatggtactggaagttcccggatgtgttaactgaaactggggtttttgggcaaaatgcacaattccactacctctaccgatcagggttctgcatccacgtgcagtgtaatgctagtaaattccaccaaggagcactcctagtcgctgtcctaccagagtatgtcattgggacagtagcaggcggcacagggacggaagatacccaccccccttataagcagacccaacccggtgccgatggcttcgagctgcagcacccgtacgtgcttgacgctggcatcccaatatcacagttaacagtgtgcccacaccagtggattaatttgaggaccaacaattgtgctacaataatagtgccatacattaacgcactgccttttgattctgccttgaaccattgcaactttggcctgctagttgtgcctattagtccactagactacgaccaaggagcgacgccagtaatccctataactatcacattggccccaatgtgttctgagttcgcaggtcttaggcaggcagtcacgcaagggttccctaccgagctaaaacctggcacaaatcaattcttaaccaccgatgatggtgtctcagcacctattctaccaaacttccaccccaccccgtgtatccacatacctggtgaagtgaggaatttgctagagttatgccaggtggaaaccattctggaggttaataatgtgcccacgaatgccactagcttgatggagagactgcgcttcccggtctcagcacaagcagggaaaggtgaactgtgtgcggtgtttagagccgatcctgggcgaaacggaccatggcaatccaccttactgggtcagttgtgcgggtactacacccaatggtcaggatcattggaggtcaccttcatgtttactggatccttcatggctaccggcaagatgctcatagcctatacaccgccaggaggtcctctgcccaaggaccgggcgaccgccatgttgggcacgcacgtcatctgggattttgggctgcaatcgtctgttacccttgtaataccatggatcagcaacactcattatagagcacatgcccgagatggagtgtttgactactacaccacagggttggtcagtatatggtatcagacaaattacgtggttccaattggtgcgcccaacacagcctatataatagcactagcggcagcccaaaagaacttcactatgaaattgtgcaaggatgctagtgatatcttgcagacgggcaccatccagggagatagggtggcagatgtaattgaaagctccataggagatagcgtgagcagagccctcactcacgctctaccagcacccacaggtcagaacacacaggtgagcagtcatcgactggatacgggcaaggttccagcactccaagctgctgaaattggagcatcatcaaatgctagtgacgagagtatgattgagacacgctgtgtcctcaactcgcacagtacagcagagaccactcttgatagtttcttcagcagggcgggattagttggagagatagatctccctcttgagggcacaactaacccaaatggttatgccaactgggacatagatataacaggttacgcgcaaatgcgtagaaaggtagagctcttcacctacatgcgctttgatgcagagttcacttttgttgcgtgtacacctaccggggaagttgttccacaactgctccaatatatgtttgtgccacctggagccccaaagccagattctagggaatcccttgcatggcaaaccgccactaacccctcagtttttgtcaagctgtcagaccctccagcacaggtttcagtgccattcatgtcacctgcgagtgcttatcaatggttttatgacggatatcccacgttcggagaacacaaacaggagaaagatcttgaatatggggcatgtcctaataacatgatgggcacgttctcagtgcggactgtagggtcctccaagtccaagtaccctctagtgattaggatttacatgagaatgaagcacgtcagggcgtggatacctcgcccgatgcgtaaccagaactacctattcaaagccaatccaaattatgctggcaactccgttaagccaactggtgccagtcgcacagcgatcaccactcttgggaaatttggacaacagtctggggctatttatgtgggcaactttagggtggtcaaccgacatcttgccactcacaatgattgggcaaatcttgtttgggaagacagctctcgcgacttgctcgtgtcatccactaccgcccaaggttgcgacacgattgcccgctgcgattgccagacaggggtgtactactgtaactcgatgagaaaacactacccagttagtttttcaaaacccagcctgatctatgtagaggctagcgagtattacccagccaggtaccaatcacatctcatgctcgcacagggtcactcagaacctggtgattgcggtggtatccttaggtgccaacatggcgtcgtcggcatagtgtccactggtggtaatgggcttgttggctttgcagacgtcagagacctcttgtggttagatgaagaagccatggaacagggcgtgtccgactacatcaagggtctcggggatgcttttggaacaggctttactgacgcagtctcaagggaggttgaagctctcaagaactatctcatagggtctgaaggagcagttgagaaaattttgaaaaatctaattaaactaatctctgcactggtgattgtgatcagaagtgattatgatatggttaccctcactgcgaccttggcgctgataggttgtcatggcagtccgtgggcttggatcaaagccaaaacagcctccatcttaggtatccctattgctcaaaagcagagcgcttcctggctcaagaagttcaatgatatggccaacgccgctaaggggttagagtgggtttccaacaagatcagcaaatttattgattggcttaaggagaagatagtaccagcagctagggagaaggttgaattcctaaataacttgaaacagctgccactgctagagaatcagatctcaaacttggaacaatctgctgcctcacaagaggaccttgaaatcatgtttgggaatgtatcgtacctagctcacttctgccgcaagttccaaccgctatacgccacggaagctaggagagtctatgccctggagaagaggatgaataactatatgcagttcaagagcaaacaccgaattgaacctgtatgtctcatcattaggggctcaccaggcactgggaagtctctagccactggtattattgctcgagcaatcgctgataagtaccactccagcgtgtactcgctcccaccagacccagatcattttgacggttacaagcaacaggtggttaccgtgatggatgatctgtgccaaaaccccgacggaaaggatatgtctttattctgtcaaatggtatccaccgtagacttcattccaccaatggcttccctcgaggagaagggagtttccttcacctctaagtttgtcatcgcatccactaatgccagtaatatcatagtaccaacagtgtctgattccgacgctattcgccgcaggttctacatggactgtgacattgaagtgacagactcatacaaaacagatctaggtagactggatgcagggcgagccgctaaactgtgctctgagaacaacactgcaaatttcaaacgttgtagcccgttagtgtgcgggaaagctatccaacttagagatagaaagtctaaagtcagatacagtgtggatacggtggtttcagaacttattagggaatacagcaataggtccgctattggcaacacaatcgaggctcttttccaaggtccacccaagttcaggccaattaggattagccttgaagaaaaaccagccccagacgctattagcgatctccttgctagcgtagatagtgaagaagtgcgccagtactgcagggatcaaggctggattattcctgaagttcccaccaatgtagagcggcaccttaatagagcggtgcttgtcatgcaatccatcgccacagtagtggcagttgtctcgttggtgtatgtcatctacaagctctttgcagggttccagggtgcgtattctggtgctcctaagcaagtgcttaagaaacctgcccttcgcacagcaacagtacagggcccgagccttgactttgctctctccctactgagaaggaacatcagacaagttcaaacagaccaggggcatttcaccatgttgggtgttagggatcgcttagcagtccttccacgtcactcacaacctggcaaaactatttgggttgaacacaaactcgtgaacgtccttgatgcagttgaactggtggatgagcaaggagtcaacctggaattgaccctcattactcttgacaccaacgagaagtttagggatattaccaagttcatcccggaaaatattagcactgctagtgatgccaccctagtgatcaacacggagcatatgccatcaatgtttgtcccggtgggtgacgttgtgcagtatggctttttgaatctcagtggtaagcctacccatcgcaccatgatgtacaactttcctactaaagcagggcagtgtggaggagtagtgacatctgttgggaaggttgtcggtattcacattggtggcaatggcagacagggtttttgcgcaggcctcaaaaggagttactttgctagtgaacaaggagagatccaatgggttaagcccaacaaagaaactggaagactcaacattaatggaccaacccgcaccaaattagaacctagtgtattccatgacatcttcgagggaaataaagagccagctgtcttgcacagtaaagacccccgacttgaagtagattttgaacaggccctgttctctaagtatgtgggaaacacactacatgagcctgacgagtacatcaaagaggcggctcttcattacgcgaaccaattgaagcaattagaaattaatacctctcaaatgagcatggaagaggcctgctacggtactgagaatcttgaggctattgatcttcacactagtgcaggatacccttatagtgccttggggataaagaaaagagagaagttctacatggacaagtatggtcttgatcttccttactccacttatgtcaaggacgagctacgctcgattgataaaattaagaaagggaagtcccgtctgatcgaggctagtagtctaaatgattcagtgtacctcagaatggctttcggacatttgtatgaggctttccacgcaaatcctgggacaataactggatcagccgtggggtgtaaccctgacacattctggagcaagctgccaattttgctccctggttcactctttgctttcgactactcaggttatgatgccagccttagccctgtctggttcagagcattagaattagttctcagggagatagggtatagtgaagaggcggtctcactcattgagggaatcaaccacacacaccatgtgtatcgtaataagacctattgtgtgcttggtgggatgccctcaggttgttcgggaacatccattttcaactcaatgatcaacaacattatcatcagagcactgctcataaaaacatttaagggcattgacttggatgaactcaacatggtcgcttatggagacgatgtgctcgctagctatcccttcccaattgattgcttggaactagcaaagactggtaaggagtatggtttgaccatgactcctgctgataaatctccttgcttcaatgaggttaattggggtaatgcgaccttccttaaaaggggctttttgcccgatgaacagtttccgttcttgattcaccccactatgccaatgagggagatccatgagtccattcgatggaccaaggacgcccgaaacactcaagatcatgtgcggtccttgtgcctcctagcatggcataatggtaaacaagaatatgagaagtttgtgagcacaattaggtctgttccagtgggaagagcgttggctattccaaattatgaaaaccttagacgcaattggctcgagttattttagaggttatacacacctcaaccccaccagaaatctggtcgtgaatgtgactggtgggggtaaatttgttataaccagaatagcaaaaaaaaaaaaaaaaaaaaaaaaa

SEQ ID NO: 15 - DNA, 7380 bp, Artificial Sequence
  Synthetic sequence
ttaaaacagcctgtgggttgcacccacccacagggcccactgggcgcaagcactctggtaccccggtacctttgtgtgcctgttttatacccccccccccaatgaaacttagaagcagcaaaccacgatcaatagtaggcataacgctccagttatgtcttgatcaagcacttctgtttccccggactgagtatcaatagactgctcgcgcggttgaaggagaaaacgttcgttatccggctagctacttcggaaaacctagtaacaccatgaaagttgcggagagcttcgttcagcactcccccagtgtagatcaggtcgatgagtcaccgcattccccacgggcgaccgtggcggtggctgcgttggcggcctgcccatggggtaacccatggggcgctctaatacggacatggtgtgaagagtctactgagctagttagtagtcctccggcccctgaatgcggctaatcccaactgcggagcacacgcccacaagccagcgggtagtgtgtcgtaacgggtaactctgcagcggaaccgactactttgggtgtccgtgtttccttttatctttatattggctgcttatggtgacaattaaagaattgttaccatatagctattggattggccatccggtgtgcaacagagcaattatttaccaatttgttggttttgtaccattaaccttgaattctgtgaccacccttaattatattttgacccttaacgcagctaaacatgggttcgcaagtgtctacacagcgctccggttctcatgaaaactcaaactcagccactgagggttctaccataaactacaccaccatcaattactacaaagactcttatgctgccacagcaggcaaacagagtctcaagcaggatccagacaagtttgcaaatcctgttaaagacatcttcactgaaatggcagcgccattgaagtccccatccgctgaggcatgtggatacagtgatcgagtggcacaattaactattggcaactccaccatcaccacgcaagaagcggctaacatcatagtcggttatggtgagtggccttcttactgctcagattctgacgctacagcagtggataaaccaacgcgcccggatgtttcagtgaataggttttacacgttagacactaaattatgggagaaatcgtccaagggatggtactggaagttcccggatgtgttaactgaaactggggtttttgggcaaaatgcacaattccactacctctaccgatcagggttctgcatccacgtgcagtgtaatgctagtaaattccaccaaggagcactcctagtcgctgtcctaccagagtatgtcattgggacagtagcaggcggcacagggacggaagatacccaccccccttataagcagacccaacccggtgccgatggcttcgagctgcagcacccgtacgtgcttgacgctggcatcccaatatcacagttaacagtgtgcccacaccagtggattaatttgaggaccaacaattgtgctacaataatagtgccatacattaacgcactgccttttgattctgccttgaaccattgcaactttggcctgctagttgtgcctattagtccactagactacgaccaaggagcgacgccagtaatccctataactatcacattggccccaatgtgttctgagttcgcaggtcttaggcaggcagtcacgcaagggttccctaccgagctaaaacctggcacaaatcaattcttaaccaccgatgatggtgtctcagcacctattctaccaaacttccaccccaccccgtgtatccacatacctggtgaagtgaggaatttgctagagttatgccaggtggaaaccattctggaggttaataatgtgcccacgaatgccactagcttgatggagagactgcgcttcccggtctcagcacaagcagggaaaggtgaactgtgtgcggtgtttagagccgatcctgggcgaaacggaccatggcaatccaccttactgggtcagttgtgcgggtactacacccaatggtcaggatcattggaggtcaccttcatgtttactggatccttcatggctaccggcaagatgctcatagcctatacaccgccaggaggtcctctgcccaaggaccgggcgaccgccatgttgggcacgcacgtcatctgggattttgggctgcaatcgtctgttacccttgtaataccatggatcagcaacactcattatagagcacatgcccgagatggagtgtttgactactacaccacagggttggtcagtatatggtatcagacaaattacgtggttccaattggtgcgcccaacacagcctatataatagcactagcggcagcccaaaagaacttcactatgaaattgtgcaaggatgctagtgatatcttgcagacgggcaccatccagggagatagggtggcagatgtaattgaaagctccataggagatagcgtgagcagagccctcactcacgctctaccagcacccacaggtcagaacacacaggtgagcagtcatcgactggatacgggcaaggttccagcactccaagctgctgaaattggagcatcatcaaatgctagtgacgagagtatgattgagacacgctgtgtcctcaactcgcacagtacagcagagaccactcttgatagtttcttcagcagggcgggattagttggagagatagatctccctcttgagggcacaactaacccaaatggttatgccaactgggacatagatataacaggttacgcgcaaatgcgtagaaaggtagagctcttcacctacatgcgctttgatgcagagttcacttttgttgcgtgtacacctaccggggaagttgttccacaactgctccaatatatgtttgtgccacctggagccccaaagccagattctagggaatcccttgcatggcaaaccgccactaacccctcagtttttgtcaagctgtcagaccctccagcacaggtttcagtgccattcatgtcacctgcgagtgcttatcaatggttttatgacggatatcccacgttcggagaacacaaacaggagaaagatcttgaatatggggcatgtcctaataacatgatgggcacgttctcagtgcggactgtagggtcctccaagtccaagtaccctctagtgattaggatttacatgagaatgaagcacgtcagggcgtggatacctcgcccgatgcgtaaccagaactacctattcaaagccaatccaaattatgctggcaactccgttaagccaactggtgccagtcgcacagcgatcaccactcttgggaaatttggacaacagtctggggctatttatgtgggcaactttagggtggtcaaccgacatcttgccactcacaatgattgggcaaatcttgtttgggaagacagctctcgcgacttgctcgtgtcatccactaccgcccaaggttgcgacacgattgcccgctgcgattgccagacaggggtgtactactgtaactcgatgagaaaacactacccagttagtttttcaaaacccagcctgatctatgtagaggctagcgagtattacccagccaggtaccaatcacatctcatgctcgcacagggtcactcagaacctggtgattgcggtggtatccttaggtgccaacatggcgtcgtcggcatagtgtccactggtggtaatgggcttgttggctttgcagacgtcagagacctcttgtggttagatgaagaagccatggaacagggcgtgtccgactacatcaagggtctcggggatgcttttggaacaggctttactgacgcagtctcaagggaggttgaagctctcaagaactatctcatagggtctgaaggagcagttgagaaaattttgaaaaatctaattaaactaatctctgcactggtgattgtgatcagaagtgattatgatatggttaccctcactgcgaccttggcgctgataggttgtcatggcagtccgtgggcttggatcaaagccaaaacagcctccatcttaggtatccctattgctcaaaagcagagcgcttcctggctcaagaagttcaatgatatggccaacgccgctaaggggttagagtgggtttccaacaagatcagcaaatttattgattggcttaaggagaagatagtaccagcagctagggagaaggttgaattcctaaataacttgaaacagctgccactgctagagaatcagatctcaaacttggaacaatctgctgcctcacaagaggaccttgaaatcatgtttgggaatgtatcgtacctagctcacttctgccgcaagttccaaccgctatacgccacggaagctaggagagtctatgccctggagaagaggatgaataactatatgcagttcaagagcaaacaccgaattgaacctgtatgtctcatcattaggggctcaccaggcactgggaagtctctagccactggtattattgctcgagcaatcgctgataagtaccactccagcgtgtactcgctcccaccagacccagatcattttgacggttacaagcaacaggtggttaccgtgatggatgatctgtgccaaaaccccgacggaaaggatatgtctttattctgtcaaatggtatccaccgtagacttcattccaccaatggcttccctcgaggagaagggagtttccttcacctctaagtttgtcatcgcatccactaatgccagtaatatcatagtaccaacagtgtctgattccgacgctattcgccgcaggttctacatggactgtgacattgaagtgacagactcatacaaaacagatctaggtagactggatgcagggcgagccgctaaactgtgctctgagaacaacactgcaaatttcaaacgttgtagcccgttagtgtgcgggaaagctatccaacttagagatagaaagtctaaagtcagatacagtgtggatacggtggtttcagaacttattagggaatacagcaataggtccgctattggcaacacaatcgaggctcttttccaaggtccacccaagttcaggccaattaggattagccttgaagaaaaaccagccccagacgctattagcgatctccttgctagcgtagatagtgaagaagtgcgccagtactgcagggatcaaggctggattattcctgaagttcccaccaatgtagagcggcaccttaatagagcggtgcttgtcatgcaatccatcgccacagtagtggcagttgtctcgttggtgtatgtcatctacaagctctttgcagggttccagggtgcgtattctggtgctcctaagcaagtgcttaagaaacctgcccttcgcacagcaacagtacagggcccgagccttgactttgctctctccctactgagaaggaacatcagacaagttcaaacagaccaggggcatttcaccatgttgggtgttagggatcgcttagcagtccttccacgtcactcacaacctggcaaaactatttgggttgaacacaaactcgtgaacgtccttgatgcagttgaactggtggatgagcaaggagtcaacctggaattgaccctcattactcttgacaccaacgagaagtttagggatattaccaagttcatcccggaaaatattagcactgctagtgatgccaccctagtgatcaacacggagcatatgccatcaatgtttgtcccggtgggtgacgttgtgcagtatggctttttgaatctcagtggtaagcctacccatcgcaccatgatgtacaactttcctactaaagcagggcagtgtggaggagtagtgacatctgttgggaaggttgtcggtattcacattggtggcaatggcagacagggtttttgcgcaggcctcaaaaggagttactttgctagtgaacaaggagagatccaatgggttaagcccaacaaagaaactggaagactcaacattaatggaccaacccgcaccaaattagaacctagtgtattccatgacatcttcgagggaaataaagagccagctgtcttgcacagtaaagacccccgacttgaagtagattttgaacaggccctgttctctaagtatgtgggaaacacactacatgagcctgacgagtacatcaaagaggcggctcttcattacgcgaaccaattgaagcaattagaaattaatacctctcaaatgagcatggaagaggcctgctacggtactgagaatcttgaggctattgatcttcacactagtgcaggatacccttatagtgccttggggataaagaaaagagacatcttagaccctaccaccagggacgtgagtaaaatgaagttctacatggacaagtatggtcttgatcttccttactccacttatgtcaaggacgagctacgctcgattgataaaattaagaaagggaagtcccgtctgatcgaggctagtagtctaaatgattcagtgtacctcagaatggctttcggacatttgtatgaggctttccacgcaaatcctgggacaataactggatcagccgtggggtgtaaccctgacacattctggagcaagctgccaattttgctccctggttcactctttgctttcgactactcaggttatgatgccagccttagccctgtctggttcagagcattagaattagttctcagggagatagggtatagtgaagaggcggtctcatgtgtgcttggtgggatgccctcaggttgttcgggaacatccattttcaactcaatgatcaacaacattatcatcagagcactgctcataaaaacatttaagggcattgacttggatgaactcaacatggtcgcttatggagacgatgtgctcgctagctatcccttcccaattgattgcttggaactagcaaagactggtaaggagtatggtttgaccatgactcctgctgataaatctccttgcttcaatgaggttaattggggtaatgcgaccttccttaaaaggggctttttgcccgatgaacagtttccgttcttgattcaccccactatgccaatgagggagatccatgagtccattcgatggaccaaggacgcccgaaacactcaagatcatgtgcggtccttgtgcctcctagcatggcataatggtaaacaagaatatgagaagtttgtgagcacaattaggtctgttccagtgggaagagcgttggctattccaaattatgaaaaccttagacgcaattggctcgagttattttagaggttatacacacctcaaccccaccagaaatctggtcgtgaatgtgactggtgggggtaaatttgttataaccagaatagcaaaaaaaaaaaaaaaaaaaaaaaaa

SEQ ID NO: 16 - DNA, 7385 bp, Artificial Sequence
  Synthetic sequence
ttaaaacagcctgtgggttgcacccacccacagggcccactgggcgcaagcactctggtaccccggtacctttgtgtgcctgttttatacccccccccccaatgaaacttagaagcagcaaaccacgatcaatagtaggcataacgctccagttatgtcttgatcaagcacttctgtttccccggactgagtatcaatagactgctcgcgcggttgaaggagaaaacgttcgttatccggctagctacttcggaaaacctagtaacaccatgaaagttgcggagagcttcgttcagcactcccccagtgtagatcaggtcgatgagtcaccgcattccccacgggcgaccgtggcggtggctgcgttggcggcctgcccatggggtaacccatggggcgctctaatacggacatggtgtgaagagtctactgagctagttagtagtcctccggcccctgaatgcggctaatcccaactgcggagcacacgcccacaagccagcgggtagtgtgtcgtaacgggtaactctgcagcggaaccgactactttgggtgtccgtgtttccttttatctttatattggctgcttatggtgacaattaaagaattgttaccatatagctattggattggccatccggtgtgcaacagagcaattatttaccaatttgttggttttgtaccattaaccttgaattctgtgaccacccttaattatattttgacccttaacgcagctaaacatgggttcgcaagtgtctacacagcgctccggttctcatgaaaactcaaactcagccactgagggttctaccataaactacaccaccatcaattactacaaagactcttatgctgccacagcaggcaaacagagtctcaagcaggatccagacaagtttgcaaatcctgttaaagacatcttcactgaaatggcagcgccattgaagtccccatccgctgaggcatgtggatacagtgatcgagtggcacaattaactattggcaactccaccatcaccacgcaagaagcggctaacatcatagtcggttatggtgagtggccttcttactgctcagattctgacgctacagcagtggataaaccaacgcgcccggatgtttcagtgaataggttttacacgttagacactaaattatgggagaaatcgtccaagggatggtactggaagttcccggatgtgttaactgaaactggggtttttgggcaaaatgcacaattccactacctctaccgatcagggttctgcatccacgtgcagtgtaatgctagtaaattccaccaaggagcactcctagtcgctgtcctaccagagtatgtcattgggacagtagcaggcggcacagggacggaagatacccaccccccttataagcagacccaacccggtgccgatggcttcgagctgcagcacccgtacgtgcttgacgctggcatcccaatatcacagttaacagtgtgcccacaccagtggattaatttgaggaccaacaattgtgctacaataatagtgccatacattaacgcactgccttttgattctgccttgaaccattgcaactttggcctgctagttgtgcctattagtccactagactacgaccaaggagcgacgccagtaatccctataactatcacattggccccaatgtgttctgagttcgcaggtcttaggcaggcagtcacgcaagggttccctaccgagctaaaacctggcacaaatcaattcttaaccaccgatgatggtgtctcagcacctattctaccaaacttccaccccaccccgtgtatccacatacctggtgaagtgaggaatttgctagagttatgccaggtggaaaccattctggaggttaataatgtgcccacgaatgccactagcttgatggagagactgcgcttcccggtctcagcacaagcagggaaaggtgaactgtgtgcggtgtttagagccgatcctgggcgaaacggaccatggcaatccaccttactgggtcagttgtgcgggtactacacccaatggtcaggatcattggaggtcaccttcatgtttactggatccttcatggctaccggcaagatgctcatagcctatacaccgccaggaggtcctctgcccaaggaccgggcgaccgccatgttgggcacgcacgtcatctgggattttgggctgcaatcgtctgttacccttgtaataccatggatcagcaacactcattatagagcacatgcccgagatggagtgtttgactactacaccacagggttggtcagtatatggtatcagacaaattacgtggttccaattggtgcgcccaacacagcctatataatagcactagcggcagcccaaaagaacttcactatgaaattgtgcaaggatgctagtgatatcttgcagacgggcaccatccagggagatagggtggcagatgtaattgaaagctccataggagatagcgtgagcagagccctcactcacgctctaccagcacccacaggtcagaacacacaggtgagcagtcatcgactggatacgggcaaggttccagcactccaagctgctgaaattggagcatcatcaaatgctagtgacgagagtatgattgagacacgctgtgtcctcaactcgcacagtacagcagagaccactcttgatagtttcttcagcagggcgggattagttggagagatagatctccctcttgagggcacaactaacccaaatggttatgccaactgggacatagatataacaggttacgcgcaaatgcgtagaaaggtagagctcttcacctacatgcgctttgatgcagagttcacttttgttgcgtgtacacctaccggggaagttgttccacaactgctccaatatatgtttgtgccacctggagccccaaagccagattctagggaatcccttgcatggcaaaccgccactaacccctcagtttttgtcaagctgtcagaccctccagcacaggtttcagtgccattcatgtcacctgcgagtgcttatcaatggttttatgacggatatcccacgttcggagaacacaaacaggagaaagatcttgaatatggggcatgtcctaataacatgatgggcacgttctcagtgcggactgtagggtcctccaagtccaagtaccctctagtgattaggatttacatgagaatgaagcacgtcagggcgtggatacctcgcccgatgcgtaaccagaactacctattcaaagccaatccaaattatgctggcaactccgttaagccaactggtgccagtcgcacagcgatcaccactcttgggaaatttggacaacagtctggggctatttatgtgggcaactttagggtggtcaaccgacatcttgccactcacaatgattgggcaaatcttgtttgggaagacagctctcgcgacttgctcgtgtcatccactaccgcccaaggttgcgacacgattgcccgctgcgattgccagacaggggtgtactactgtaactcgatgagaaaacactacccagttagtttttcaaaacccagcctgatctatgtagaggctagcgagtattacccagccaggtaccaatcacatctcatgctcgcacagggtcactcagaacctggtgattgcggtggtatccttaggtgccaacatggcgtcgtcggcatagtgtccactggtggtaatgggcttgttggctttgcagacgtcagagacctcttgtggttagatgaagaagccatggaacagggcgtgtccgactacatcaagggtctcggggatgcttttggaacaggctttactgacgcagtctcaagggaggttgaagctctcaagaactatctcatagggtctgaaggagcagttgagaaaattttgaaaaatctaattaaactaatctctgcactggtgattgtgatcagaagtgattatgatatggttaccctcactgcgaccttggcgctgataggttgtcatggcagtccgtgggcttggatcaaagccaaaacagcctccatcttaggtatccctattgctcaaaagcagagcgcttcctggctcaagaagttcaatgatatggccaacgccgctaaggggttagagtgggtttccaacaagatcagcaaatttattgattggcttaaggagaagatagtaccagcagctagggagaaggttgaattcctaaataacttgaaacagctgccactgctagagaatcagatctcaaacttggaacaatctgctgcctcacaagaggaccttgaaatcatgtttgggaatgtatcgtacctagctcacttctgccgcaagttccaaccgctatacgccacggaagctaggagagtctatgccctggagaagaggatgaataactatatgcagttcaagagcaaacaccgaattgaacctgtatgtctcatcattaggggctcaccaggcactgggaagtctctagccactggtattattgctcgagcaatcgctgataagtaccactccagcgtgtactcgctcccaccagacccagatcattttgacggttacaagcaacaggtggttaccgtgatggatgatctgtgccaaaaccccgacggaaaggatatgtctttattctgtcaaatggtatccaccgtagacttcattccaccaatggcttccctcgaggagaagggagtttccttcacctctaagtttgtcatcgcatccactaatgccagtaatatcatagtaccaacagtgtctgattccgacgctattcgccgcaggttctacatggactgtgacattgaagtgacagactcatacaaaacagatctaggtagactggatgcagggcgagccgctaaactgtgctctgagaacaacactgcaaatttcaaacgttgtagcccgttagtgtgcgggaaagctatccaacttagagatagaaagtctaaagtcagatacagtgtggatacggtggtttcagaacttattagggaatacagcaataggtccgctattggcaacacaatcgaggctcttttccaaggtccacccaagttcaggccaattaggattagccttgaagaaaaaccagccccagacgctattagcgatctccttgctagcgtagatagtgaagaagtgcgccagtactgcagggatcaaggctggattattcctgaagttcccaccaatgtagagcggcaccttaatagagcggtgcttgtcatgcaatccatcgccacagtagtggcagttgtctcgttggtgtatgtcatctacaagctctttgcagggttccagggtgcgtattctggtgctcctaagcaagtgcttaagaaacctgcccttcgcacagcaacagtacagggcccgagccttgactttgctctctccctactgagaaggaacatcagacaagttcaaacagaccaggggcatttcaccatgttgggtgttagggatcgcttagcagtccttccacgtcactcacaacctggcaaaactatttgggttgaacacaaactcgtgaacgtccttgatgcagttgaactggtggatgagcaaggagtcaacctggaattgaccctcattactcttgacaccaacgagaagtttagggatattaccaagttcatcccggaaaatattagcactgctagtgatgccaccctagtgatcaacacggagcatatgccatcaatgtttgtcccggtgggtgacgttgtgcagtatggctttttgaatctcagtggtaagcctacccatcgcaccatgatgtacaactttcctactaaagcagggcagtgtggaggagtagtgacatctgttgggaaggttgtcggtattcacattggtggcaatggcagacagggtttttgcgcaggcctcaaaaggagttactttgctagtgaacaaggagagatccaatgggttaagcccaacaaagaaactggaagactcaacattaatggaccaacccgcaccaaattagaacctagtgtattccatgacatcttcgagggaaataaagagccagctgtcttgcacagtaaagacccccgacttgaagtagattttgaacaggccctgttctctaagtatgtgggaaacacactacatgagcctgacgagtacatcaaagaggcggctcttcattacgcgaaccaattgaagcaattagaaattaatacctctcaaatgagcatggaagaggcctgctacggtactgagaatcttgaggctattgatcttcacactagtgcaggatacccttatagtgccttggggataaagaaaagagacatcttagaccctaccaccagggacgtgagtaaaatgaagttctacatggacaagtatggtcttgatcttccttactccacttatgtcaaggacgagctacgctcgattgataaaattaagaaagggaagtcccgtctgatcgaggctagtagtctaaatgattcagtgtacctcagaatggctttcggacatttgtatgaggctttccacgcaaatcctgggacaataactggatcagccgtggggtgtaaccctgacacattctggagcaagctgccaattttgctccctggttcactctttgctttcgactactcaggttatgatgccagccttagccctgtctggttcagagcattagaattagttctcagggagatagggtatagtgaagaggcggtctcactcattgagggaatcaaccacacacaccatgtgtatcgtaataagacctattgtgtgcttggtgggatgccctcaggttgttcgggaacatccattttcaactcaatgatcaacaacattatcatcagagcactgctcataaaaacatttaagggcattgacttggatgaactcaacatggtcgcttatggagacgatgtgctcgctagctatcccttcccaattgattgcttggaactaaatctccttgcttcaatgaggttaattggggtaatgcgaccttccttaaaaggggctttttgcccgatgaacagtttccgttcttgattcaccccactatgccaatgagggagatccatgagtccattcgatggaccaaggacgcccgaaacactcaagatcatgtgcggtccttgtgcctcctagcatggcataatggtaaacaagaatatgagaagtttgtgagcacaattaggtctgttccagtgggaagagcgttggctattccaaattatgaaaaccttagacgcaattggctcgagttattttagaggttatacacacctcaaccccaccagaaatctggtcgtgaatgtgactggtgggggtaaatttgttataaccagaatagcaaaaaaaaaaaaaaaaaaaaaaaaa

SEQ ID NO: 17 - DNA, 7383 bp, Artificial Sequence
  Synthetic sequence
ttaaaacagcctgtgggttgcacccacccacagggcccactgggcgcaagcactctggtaccccggtacctttgtgtgcctgttttatacccccccccccaatgaaacttagaagcagcaaaccacgatcaatagtaggcataacgctccagttatgtcttgatcaagcacttctgtttccccggactgagtatcaatagactgctcgcgcggttgaaggagaaaacgttcgttatccggctagctacttcggaaaacctagtaacaccatgaaagttgcggagagcttcgttcagcactcccccagtgtagatcaggtcgatgagtcaccgcattccccacgggcgaccgtggcggtggctgcgttggcggcctgcccatggggtaacccatggggcgctctaatacggacatggtgtgaagagtctactgagctagttagtagtcctccggcccctgaatgcggctaatcccaactgcggagcacacgcccacaagccagcgggtagtgtgtcgtaacgggtaactctgcagcggaaccgactactttgggtgtccgtgtttccttttatctttatattggctgcttatggtgacaattaaagaattgttaccatatagctattggattggccatccggtgtgcaacagagcaattatttaccaatttgttggttttgtaccattaaccttgaattctgtgaccacccttaattatattttgacccttaacgcagctaaacatgggttcgcaagtgtctacacagcgctccggttctcatgaaaactcaaactcagccactgagggttctaccataaactacaccaccatcaattactacaaagactcttatgctgccacagcaggcaaacagagtctcaagcaggatccagacaagtttgcaaatcctgttaaagacatcttcactgaaatggcagcgccattgaagtccccatccgctgaggcatgtggatacagtgatcgagtggcacaattaactattggcaactccaccatcaccacgcaagaagcggctaacatcatagtcggttatggtgagtggccttcttactgctcagattctgacgctacagcagtggataaaccaacgcgcccggatgtttcagtgaataggttttacacgttagacactaaattatgggagaaatcgtccaagggatggtactggaagttcccggatgtgttaactgaaactggggtttttgggcaaaatgcacaattccactacctctaccgatcagggttctgcatccacgtgcagtgtaatgctagtaaattccaccaaggagcactcctagtcgctgtcctaccagagtatgtcattgggacagtagcaggcggcacagggacggaagatacccaccccccttataagcagacccaacccggtgccgatggcttcgagctgcagcacccgtacgtgcttgacgctggcatcccaatatcacagttaacagtgtgcccacaccagtggattaatttgaggaccaacaattgtgctacaataatagtgccatacattaacgcactgccttttgattctgccttgaaccattgcaactttggcctgctagttgtgcctattagtccactagactacgaccaaggagcgacgccagtaatccctataactatcacattggccccaatgtgttctgagttcgcaggtcttaggcaggcagtcacgcaagggttccctaccgagctaaaacctggcacaaatcaattcttaaccaccgatgatggtgtctcagcacctattctaccaaacttccaccccaccccgtgtatccacatacctggtgaagtgaggaatttgctagagttatgccaggtggaaaccattctggaggttaataatgtgcccacgaatgccactagcttgatggagagactgcgcttcccggtctcagcacaagcagggaaaggtgaactgtgtgcggtgtttagagccgatcctgggcgaaacggaccatggcaatccaccttactgggtcagttgtgcgggtactacacccaatggtcaggatcattggaggtcaccttcatgtttactggatccttcatggctaccggcaagatgctcatagcctatacaccgccaggaggtcctctgcccaaggaccgggcgaccgccatgttgggcacgcacgtcatctgggattttgggctgcaatcgtctgttacccttgtaataccatggatcagcaacactcattatagagcacatgcccgagatggagtgtttgactactacaccacagggttggtcagtatatggtatcagacaaattacgtggttccaattggtgcgcccaacacagcctatataatagcactagcggcagcccaaaagaacttcactatgaaattgtgcaaggatgctagtgatatcttgcagacgggcaccatccagggagatagggtggcagatgtaattgaaagctccataggagatagcgtgagcagagccctcactcacgctctaccagcacccacaggtcagaacacacaggtgagcagtcatcgactggatacgggcaaggttccagcactccaagctgctgaaattggagcatcatcaaatgctagtgacgagagtatgattgagacacgctgtgtcctcaactcgcacagtacagcagagaccactcttgatagtttcttcagcagggcgggattagttggagagatagatctccctcttgagggcacaactaacccaaatggttatgccaactgggacatagatataacaggttacgcgcaaatgcgtagaaaggtagagctcttcacctacatgcgctttgatgcagagttcacttttgttgcgtgtacacctaccggggaagttgttccacaactgctccaatatatgtttgtgccacctggagccccaaagccagattctagggaatcccttgcatggcaaaccgccactaacccctcagtttttgtcaagctgtcagaccctccagcacaggtttcagtgccattcatgtcacctgcgagtgcttatcaatggttttatgacggatatcccacgttcggagaacacaaacaggagaaagatcttgaatatggggcatgtcctaataacatgatgggcacgttctcagtgcggactgtagggtcctccaagtccaagtaccctctagtgattaggatttacatgagaatgaagcacgtcagggcgtggatacctcgcccgatgcgtaaccagaactacctattcaaagccaatccaaattatgctggcaactccgttaagccaactggtgccagtcgcacagcgatcaccactcttgggaaatttggacaacagtctggggctatttatgtgggcaactttagggtggtcaaccgacatcttgccactcacaatgattgggcaaatcttgtttgggaagacagctctcgcgacttgctcgtgtcatccactaccgcccaaggttgcgacacgattgcccgctgcgattgccagacaggggtgtactactgtaactcgatgagaaaacactacccagttagtttttcaaaacccagcctgatctatgtagaggctagcgagtattacccagccaggtaccaatcacatctcatgctcgcacagggtcactcagaacctggtgattgcggtggtatccttaggtgccaacatggcgtcgtcggcatagtgtccactggtggtaatgggcttgttggctttgcagacgtcagagacctcttgtggttagatgaagaagccatggaacagggcgtgtccgactacatcaagggtctcggggatgcttttggaacaggctttactgacgcagtctcaagggaggttgaagctctcaagaactatctcatagggtctgaaggagcagttgagaaaattttgaaaaatctaattaaactaatctctgcactggtgattgtgatcagaagtgattatgatatggttaccctcactgcgaccttggcgctgataggttgtcatggcagtccgtgggcttggatcaaagccaaaacagcctccatcttaggtatccctattgctcaaaagcagagcgcttcctggctcaagaagttcaatgatatggccaacgccgctaaggggttagagtgggtttccaacaagatcagcaaatttattgattggcttaaggagaagatagtaccagcagctagggagaaggttgaattcctaaataacttgaaacagctgccactgctagagaatcagatctcaaacttggaacaatctgctgcctcacaagaggaccttgaaatcatgtttgggaatgtatcgtacctagctcacttctgccgcaagttccaaccgctatacgccacggaagctaggagagtctatgccctggagaagaggatgaataactatatgcagttcaagagcaaacaccgaattgaacctgtatgtctcatcattaggggctcaccaggcactgggaagtctctagccactggtattattgctcgagcaatcgctgataagtaccactccagcgtgtactcgctcccaccagacccagatcattttgacggttacaagcaacaggtggttaccgtgatggatgatctgtgccaaaaccccgacggaaaggatatgtctttattctgtcaaatggtatccaccgtagacttcattccaccaatggcttccctcgaggagaagggagtttccttcacctctaagtttgtcatcgcatccactaatgccagtaatatcatagtaccaacagtgtctgattccgacgctattcgccgcaggttctacatggactgtgacattgaagtgacagactcatacaaaacagatctaggtagactggatgcagggcgagccgctaaactgtgctctgagaacaacactgcaaatttcaaacgttgtagcccgttagtgtgcgggaaagctatccaacttagagatagaaagtctaaagtcagatacagtgtggatacggtggtttcagaacttattagggaatacagcaataggtccgctattggcaacacaatcgaggctcttttccaaggtccacccaagttcaggccaattaggattagccttgaagaaaaaccagccccagacgctattagcgatctccttgctagcgtagatagtgaagaagtgcgccagtactgcagggatcaaggctggattattcctgaagttcccaccaatgtagagcggcaccttaatagagcggtgcttgtcatgcaatccatcgccacagtagtggcagttgtctcgttggtgtatgtcatctacaagctctttgcagggttccagggtgcgtattctggtgctcctaagcaagtgcttaagaaacctgcccttcgcacagcaacagtacagggcccgagccttgactttgctctctccctactgagaaggaacatcagacaagttcaaacagaccaggggcatttcaccatgttgggtgttagggatcgcttagcagtccttccacgtcactcacaacctggcaaaactatttgggttgaacacaaactcgtgaacgtccttgatgcagttgaactggtggatgagcaaggagtcaacctggaattgaccctcattactcttgacaccaacgagaagtttagggatattaccaagttcatcccggaaaatattagcactgctagtgatgccaccctagtgatcaacacggagcatatgccatcaatgtttgtcccggtgggtgacgttgtgcagtatggctttttgaatctcagtggtaagcctacccatcgcaccatgatgtacaactttcctactaaagcagggcagtgtggaggagtagtgacatctgttgggaaggttgtcggtattcacattggtggcaatggcagacagggtttttgcgcaggcctcaaaaggagttactttgctagtgaacaaggagagatccaatgggttaagcccaacaaagaaactggaagactcaacattaatggaccaacccgcaccaaattagaacctagtgtattccatgacatcttcgagggaaataaagagccagctgtcttgcacagtaaagacccccgacttgaagtagattttgaacaggccctgttctctaagtatgtgggaaacacactacatgagcctgacgagtacatcaaagaggcggctcttcattacgcgaaccaattgaagcaattagaaattaatacctctcaaatgagcatggaagaggcctgctacggtactgagaatcttgaggctattgatcttcacactagtgcaggatacccttatagtgccttggggataaagaaaagagacatcttagaccctaccaccagggacgtgagtaaaatgaagttctacatggacaagtatggtcttgatcttccttactccacttatgtcaaggacgagctacgctcgattgataaaattaagaaagggaagtcccgtctgatcgaggctagtagtctaaatgattcagtgtacctcagaatggctttcggacatttgtatgaggctttccacgcaaatcctgggacaataactggatcagccgtggggtgtaaccctgacacattctggagcaagctgccaattttgctccctggttcactctttgctttcgactactcaggttatgatgccagccttagccctgtctggttcagagcattagaattagttctcagggagatagggtatagtgaagaggcggtctcactcattgagggaatcaaccacacacaccatgtgtatcgtaataagacctattgtgtgcttggtgggatgccctcaggttgttcgggaacatccattttcaactcaatgatcaacaacattatcatcagagcactgctcataaaaacatttaagggcattgacttggatgaactcaacatggtcgcttatggagacgatgtgctcgctagctatcccttcccaattgattgcttggaacaatctccttgcttcaatgaggttaattggggtaatgcgaccttccttaaaaggggctttttgcccgatgaacagtttccgttcttgattcaccccactatgccaatgagggagatccatgagtccattcgatggaccaaggacgcccgaaacactcaagatcatgtgcggtccttgtgcctcctagcatggcataatggtaaacaagaatatgagaagtttgtgagcacaattaggtctgttccagtgggaagagcgttggctattccaaattatgaaaaccttagacgcaattggctcgagttattttagaggttatacacacctcaaccccaccagaaatctggtcgtgaatgtgactggtgggggtaaatttgttataaccagaatagcaaaaaaaaaaaaaaaaaaaaaaaaa

SEQ ID NO: 18 - DNA, 7407 bp, Artificial Sequence
  Synthetic sequence
ttaaaacagcctgtgggttgcacccacccacagggcccactgggcgcaagcactctggtaccccggtacctttgtgtgcctgttttatacccccccccccaatgaaacttagaagcagcaaaccacgatcaatagtaggcataacgctccagttatgtcttgatcaagcacttctgtttccccggactgagtatcaatagactgctcgcgcggttgaaggagaaaacgttcgttatccggctagctacttcggaaaacctagtaacaccatgaaagttgcggagagcttcgttcagcactcccccagtgtagatcaggtcgatgagtcaccgcattccccacgggcgaccgtggcggtggctgcgttggcggcctgcccatggggtaacccatggggcgctctaatacggacatggtgtgaagagtctactgagctagttagtagtcctccggcccctgaatgcggctaatcccaactgcggagcacacgcccacaagccagcgggtagtgtgtcgtaacgggtaactctgcagcggaaccgactactttgggtgtccgtgtttccttttatctttatattggctgcttatggtgacaattaaagaattgttaccatatagctattggattggccatccggtgtgcaacagagcaattatttaccaatttgttggttttgtaccattaaccttgaattctgtgaccacccttaattatattttgacccttaacgcagctaaacatgggttcgcaagtgtctacacagcgctccggttctcatgaaaactcaaactcagccactgagggttctaccataaactacaccaccatcaattactacaaagactcttatgctgccacagcaggcaaacagagtctcaagcaggatccagacaagtttgcaaatcctgttaaagacatcttcactgaaatggcagcgccattgaagtccccatccgctgaggcatgtggatacagtgatcgagtggcacaattaactattggcaactccaccatcaccacgcaagaagcggctaacatcatagtcggttatggtgagtggccttcttactgctcagattctgacgctacagcagtggataaaccaacgcgcccggatgtttcagtgaataggttttacacgttagacactaaattatgggagaaatcgtccaagggatggtactggaagttcccggatgtgttaactgaaactggggtttttgggcaaaatgcacaattccactacctctaccgatcagggttctgcatccacgtgcagtgtaatgctagtaaattccaccaaggagcactcctagtcgctgtcctaccagagtatgtcattgggacagtagcaggcggcacagggacggaagatacccaccccccttataagcagacccaacccggtgccgatggcttcgagctgcagcacccgtacgtgcttgacgctggcatcccaatatcacagttaacagtgtgcccacaccagtggattaatttgaggaccaacaattgtgctacaataatagtgccatacattaacgcactgccttttgattctgccttgaaccattgcaactttggcctgctagttgtgcctattagtccactagactacgaccaaggagcgacgccagtaatccctataactatcacattggccccaatgtgttctgagttcgcaggtcttaggcaggcagtcacgcaagggttccctaccgagctaaaacctggcacaaatcaattcttaaccaccgatgatggtgtctcagcacctattctaccaaacttccaccccaccccgtgtatccacatacctggtgaagtgaggaatttgctagagttatgccaggtggaaaccattctggaggttaataatgtgcccacgaatgccactagcttgatggagagactgcgcttcccggtctcagcacaagcagggaaaggtgaactgtgtgcggtgtttagagccgatcctgggcgaaacggaccatggcaatccaccttactgggtcagttgtgcgggtactacacccaatggtcaggatcattggaggtcaccttcatgtttactggatccttcatggctaccggcaagatgctcatagcctatacaccgccaggaggtcctctgcccaaggaccgggcgaccgccatgttgggcacgcacgtcatctgggattttgggctgcaatcgtctgttacccttgtaataccatggatcagcaacactcattatagagcacatgcccgagatggagtgtttgactactacaccacagggttggtcagtatatggtatcagacaaattacgtggttccaattggtgcgcccaacacagcctatataatagcactagcggcagcccaaaagaacttcactatgaaattgtgcaaggatgctagtgatatcttgcagacgggcaccatccagggagatagggtggcagatgtaattgaaagctccataggagatagcgtgagcagagccctcactcacgctctaccagcacccacaggtcagaacacacaggtgagcagtcatcgactggatacgggcaaggttccagcactccaagctgctgaaattggagcatcatcaaatgctagtgacgagagtatgattgagacacgctgtgtcctcaactcgcacagtacagcagagaccactcttgatagtttcttcagcagggcgggattagttggagagatagatctccctcttgagggcacaactaacccaaatggttatgccaactgggacatagatataacaggttacgcgcaaatgcgtagaaaggtagagctcttcacctacatgcgctttgatgcagagttcacttttgttgcgtgtacacctaccggggaagttgttccacaactgctccaatatatgtttgtgccacctggagccccaaagccagattctagggaatcccttgcatggcaaaccgccactaacccctcagtttttgtcaagctgtcagaccctccagcacaggtttcagtgccattcatgtcacctgcgagtgcttatcaatggttttatgacggatatcccacgttcggagaacacaaacaggagaaagatcttgaatatggggcatgtcctaataacatgatgggcacgttctcagtgcggactgtagggtcctccaagtccaagtaccctctagtgattaggatttacatgagaatgaagcacgtcagggcgtggatacctcgcccgatgcgtaaccagaactacctattcaaagccaatccaaattatgctggcaactccgttaagccaactggtgccagtcgcacagcgatcaccactcttgggaaatttggacaacagtctggggctatttatgtgggcaactttagggtggtcaaccgacatcttgccactcacaatgattgggcaaatcttgtttgggaagacagctctcgcgacttgctcgtgtcatccactaccgcccaaggttgcgacacgattgcccgctgcgattgccagacaggggtgtactactgtaactcgatgagaaaacactacccagttagtttttcaaaacccagcctgatctatgtagaggctagcgagtattacccagccaggtaccaatcacatctcatgctcgcacagggtcactcagaacctggtgattgcggtggtatccttaggtgccaacatggcgtcgtcggcatagtgtccactggtggtaatgggcttgttggctttgcagacgtcagagacctcttgtggttagatgaagaagccatggaacagggcgtgtccgactacatcaagggtctcggggatgcttttggaacaggctttactgacgcagtctcaagggaggttgaagctctcaagaactatctcatagggtctgaaggagcagttgagaaaattttgaaaaatctaattaaactaatctctgcactggtgattgtgatcagaagtgattatgatatggttaccctcactgcgaccttggcgctgataggttgtcatggcagtccgtgggcttggatcaaagccaaaacagcctccatcttaggtatccctattgctcaaaagcagagcgcttcctggctcaagaagttcaatgatatggccaacgccgctaaggggttagagtgggtttccaacaagatcagcaaatttattgattggcttaaggagaagatagtaccagcagctagggagaaggttgaattcctaaataacttgaaacagctgccactgctagagaatcagatctcaaacttggaacaatctgctgcctcacaagaggaccttgaaatcatgtttgggaatgtatcgtacctagctcacttctgccgcaagttccaaccgctatacgccacggaagctaggagagtctatgccctggagaagaggatgaataactatatgcagttcaagagcaaacaccgaattgaacctgtatgtctcatcattaggggctcaccaggcactgggaagtctctagccactggtattattgctcgagcaatcgctgataagtaccactccagcgtgtactcgctcccaccagacccagatcattttgacggttacaagcaacaggtggttaccgtgatggatgatctgtgccaaaaccccgacggaaaggatatgtctttattctgtcaaatggtatccaccgtagacttcattccaccaatggcttccctcgaggagaagggagtttccttcacctctaagtttgtcatcgcatccactaatgccagtaatatcatagtaccaacagtgtctgattccgacgctattcgccgcaggttctacatggactgtgacattgaagtgacagactcatacaaaacagatctaggtagactggatgcagggcgagccgctaaactgtgctctgagaacaacactgcaaatttcaaacgttgtagcccgttagtgtgcgggaaagctatccaacttagagatagaaagtctaaagtcagatacagtgtggatacggtggtttcagaacttattagggaatacagcaataggtccgctattggcaacacaatcgaggctcttttccaaggtccacccaagttcaggccaattaggattagccttgaagaaaaaccagccccagacgctattagcgatctccttgctagcgtagatagtgaagaagtgcgccagtactgcagggatcaaggctggattattcctgaagttcccaccaatgtagagcggcaccttaatagagcggtgcttgtcatgcaatccatcgccacagtagtggcagttgtctcgttggtgtatgtcatctacaagctctttgcagggttccagggtgcgtattctggtgctcctaagcaagtgcttaagaaacctgcccttcgcacagcaacagtacagggcccgagccttgactttgctctctccctactgagaaggaacatcagacaagttcaaacagaccaggggcatttcaccatgttgggtgttagggatcgcttagcagtccttccacgtcactcacaacctggcaaaactatttgggttgaacacaaactcgtgaacgtccttgatgcagttgaactggtggatgagcaaggagtcaacctggaattgaccctcattactcttgacaccaacgagaagtttagggatattaccaagttcatcccggaaaatattagcactgctagtgatgccaccctagtgatcaacacggagcatatgccatcaatgtttgtcccggtgggtgacgttgtgcagtatggctttttgaatctcagtggtaagcctacccatcgcaccatgatgtacaactttcctactaaagcagggcagtgtggaggagtagtgacatctgttgggaaggttgtcggtattcacattggtggcaatggcagacagggtttttgcgcaggcctcaaaaggagttactttgctagtgaacaaggagagatccaatgggttaagcccaacaaagaaactggaagactcaacattaatggaccaacccgcaccaaattagaacctagtgtattccatgacatcttcgagggaaataaagagccagctgtcttgcacagtaaagacccccgacttgaagtagattttgaacaggccctgttctctaagtatgtgggaaacacactacatgagcctgacgagtacatcaaagaggcggctcttcattacgcgaaccaattgaagcaattagaaattaatacctctcaaatgagcatggaagaggcctgctacggtactgagaatcttgaggctattgatcttcacactagtgcaggatacccttatagtgccttggggataaagaaaagagacatcttagaccctaccaccagggacgtgagtaaaatgaagttctacatggacaagtatggtcttgatcttccttactccacttatgtcaaggacgagctacgctcgattgataaaattaagaaagggaagtcccgtctgatcgaggctagtagtctaaatgattcagtgtacctcagaatggctttcggacatttgtatgaggctttccacgcaaatcctgggacaataactggatcagccgtggggtgtaaccctgacacattctggagcaagctgccaattttgctccctggttcactctttgctttcgactactcaggttatgatgccagccttagccctgtctggttcagagcattagaattagttctcagggagatagggtatagtgaagaggcggtctcactcattgagggaatcaaccacacacaccatgtgtatcgtaataagacctattgtgtgcttggtgggatgccctcaggttgttcgggaacatccattttcaactcaatgatcaacaacattatcatcagagcactgctcataaaaacatttaagggcattgacttggatgaactcaacatggtcgcttatggagacgatgtgctcgctagctatcccttcccaattgattgcttggaactagcaaagactggtaaggagtatggtttgaccatgactcctgctgataaatctccttgcttcaatgaggttaattggggtaatgcgaccttccttaaaaggggctttttgcccgatgaacagtttccgttctgggagatccatgagtccattcgatggaccaaggacgcccgaaacactcaagatcatgtgcggtccttgtgcctcctagcatggcataatggtaaacaagaatatgagaagtttgtgagcacaattaggtctgttccagtgggaagagcgttggctattccaaattatgaaaaccttagacgcaattggctcgagttattttagaggttatacacacctcaaccccaccagaaatctggtcgtgaatgtgactggtgggggtaaatttgttataaccagaatagcaaaaaaaaaaaaaaaaaaaaaaaaa

SEQ ID NO: 19 - DNA, 7396 bp, Artificial Sequence
  Synthetic sequence
ttaaaacagcctgtgggttgcacccacccacagggcccactgggcgcaagcactctggtaccccggtacctttgtgtgcctgttttatacccccccccccaatgaaacttagaagcagcaaaccacgatcaatagtaggcataacgctccagttatgtcttgatcaagcacttctgtttccccggactgagtatcaatagactgctcgcgcggttgaaggagaaaacgttcgttatccggctagctacttcggaaaacctagtaacaccatgaaagttgcggagagcttcgttcagcactcccccagtgtagatcaggtcgatgagtcaccgcattccccacgggcgaccgtggcggtggctgcgttggcggcctgcccatggggtaacccatggggcgctctaatacggacatggtgtgaagagtctactgagctagttagtagtcctccggcccctgaatgcggctaatcccaactgcggagcacacgcccacaagccagcgggtagtgtgtcgtaacgggtaactctgcagcggaaccgactactttgggtgtccgtgtttccttttatctttatattggctgcttatggtgacaattaaagaattgttaccatatagctattggattggccatccggtgtgcaacagagcaattatttaccaatttgttggttttgtaccattaaccttgaattctgtgaccacccttaattatattttgacccttaacgcagctaaacatgggttcgcaagtgtctacacagcgctccggttctcatgaaaactcaaactcagccactgagggttctaccataaactacaccaccatcaattactacaaagactcttatgctgccacagcaggcaaacagagtctcaagcaggatccagacaagtttgcaaatcctgttaaagacatcttcactgaaatggcagcgccattgaagtccccatccgctgaggcatgtggatacagtgatcgagtggcacaattaactattggcaactccaccatcaccacgcaagaagcggctaacatcatagtcggttatggtgagtggccttcttactgctcagattctgacgctacagcagtggataaaccaacgcgcccggatgtttcagtgaataggttttacacgttagacactaaattatgggagaaatcgtccaagggatggtactggaagttcccggatgtgttaactgaaactggggtttttgggcaaaatgcacaattccactacctctaccgatcagggttctgcatccacgtgcagtgtaatgctagtaaattccaccaaggagcactcctagtcgctgtcctaccagagtatgtcattgggacagtagcaggcggcacagggacggaagatacccaccccccttataagcagacccaacccggtgccgatggcttcgagctgcagcacccgtacgtgcttgacgctggcatcccaatatcacagttaacagtgtgcccacaccagtggattaatttgaggaccaacaattgtgctacaataatagtgccatacattaacgcactgccttttgattctgccttgaaccattgcaactttggcctgctagttgtgcctattagtccactagactacgaccaaggagcgacgccagtaatccctataactatcacattggccccaatgtgttctgagttcgcaggtcttaggcaggcagtcacgcaagggttccctaccgagctaaaacctggcacaaatcaattcttaaccaccgatgatggtgtctcagcacctattctaccaaacttccaccccaccccgtgtatccacatacctggtgaagtgaggaatttgctagagttatgccaggtggaaaccattctggaggttaataatgtgcccacgaatgccactagcttgatggagagactgcgcttcccggtctcagcacaagcagggaaaggtgaactgtgtgcggtgtttagagccgatcctgggcgaaacggaccatggcaatccaccttactgggtcagttgtgcgggtactacacccaatggtcaggatcattggaggtcaccttcatgtttactggatccttcatggctaccggcaagatgctcatagcctatacaccgccaggaggtcctctgcccaaggaccgggcgaccgccatgttgggcacgcacgtcatctgggattttgggctgcaatcgtctgttacccttgtaataccatggatcagcaacactcattatagagcacatgcccgagatggagtgtttgactactacaccacagggttggtcagtatatggtatcagacaaattacgtggttccaattggtgcgcccaacacagcctatataatagcactagcggcagcccaaaagaacttcactatgaaattgtgcaaggatgctagtgatatcttgcagacgggcaccatccagggagatagggtggcagatgtaattgaaagctccataggagatagcgtgagcagagccctcactcacgctctaccagcacccacaggtcagaacacacaggtgagcagtcatcgactggatacgggcaaggttccagcactccaagctgctgaaattggagcatcatcaaatgctagtgacgagagtatgattgagacacgctgtgtcctcaactcgcacagtacagcagagaccactcttgatagtttcttcagcagggcgggattagttggagagatagatctccctcttgagggcacaactaacccaaatggttatgccaactgggacatagatataacaggttacgcgcaaatgcgtagaaaggtagagctcttcacctacatgcgctttgatgcagagttcacttttgttgcgtgtacacctaccggggaagttgttccacaactgctccaatatatgtttgtgccacctggagccccaaagccagattctagggaatcccttgcatggcaaaccgccactaacccctcagtttttgtcaagctgtcagaccctccagcacaggtttcagtgccattcatgtcacctgcgagtgcttatcaatggttttatgacggatatcccacgttcggagaacacaaacaggagaaagatcttgaatatggggcatgtcctaataacatgatgggcacgttctcagtgcggactgtagggtcctccaagtccaagtaccctctagtgattaggatttacatgagaatgaagcacgtcagggcgtggatacctcgcccgatgcgtaaccagaactacctattcaaagccaatccaaattatgctggcaactccgttaagccaactggtgccagtcgcacagcgatcaccactcttgggaaatttggacaacagtctggggctatttatgtgggcaactttagggtggtcaaccgacatcttgccactcacaatgattgggcaaatcttgtttgggaagacagctctcgcgacttgctcgtgtcatccactaccgcccaaggttgcgacacgattgcccgctgcgattgccagacaggggtgtactactgtaactcgatgagaaaacactacccagttagtttttcaaaacccagcctgatctatgtagaggctagcgagtattacccagccaggtaccaatcacatctcatgctcgcacagggtcactcagaacctggtgattgcggtggtatccttaggtgccaacatggcgtcgtcggcatagtgtccactggtggtaatgggcttgttggctttgcagacgtcagagacctcttgtggttagatgaagaagccatggaacagggcgtgtccgactacatcaagggtctcggggatgcttttggaacaggctttactgacgcagtctcaagggaggttgaagctctcaagaactatctcatagggtctgaaggagcagttgagaaaattttgaaaaatctaattaaactaatctctgcactggtgattgtgatcagaagtgattatgatatggttaccctcactgcgaccttggcgctgataggttgtcatggcagtccgtgggcttggatcaaagccaaaacagcctccatcttaggtatccctattgctcaaaagcagagcgcttcctggctcaagaagttcaatgatatggccaacgccgctaaggggttagagtgggtttccaacaagatcagcaaatttattgattggcttaaggagaagatagtaccagcagctagggagaaggttgaattcctaaataacttgaaacagctgccactgctagagaatcagatctcaaacttggaacaatctgctgcctcacaagaggaccttgaaatcatgtttgggaatgtatcgtacctagctcacttctgccgcaagttccaaccgctatacgccacggaagctaggagagtctatgccctggagaagaggatgaataactatatgcagttcaagagcaaacaccgaattgaacctgtatgtctcatcattaggggctcaccaggcactgggaagtctctagccactggtattattgctcgagcaatcgctgataagtaccactccagcgtgtactcgctcccaccagacccagatcattttgacggttacaagcaacaggtggttaccgtgatggatgatctgtgccaaaaccccgacggaaaggatatgtctttattctgtcaaatggtatccaccgtagacttcattccaccaatggcttccctcgaggagaagggagtttccttcacctctaagtttgtcatcgcatccactaatgccagtaatatcatagtaccaacagtgtctgattccgacgctattcgccgcaggttctacatggactgtgacattgaagtgacagactcatacaaaacagatctaggtagactggatgcagggcgagccgctaaactgtgctctgagaacaacactgcaaatttcaaacgttgtagcccgttagtgtgcgggaaagctatccaacttagagatagaaagtctaaagtcagatacagtgtggatacggtggtttcagaacttattagggaatacagcaataggtccgctattggcaacacaatcgaggctcttttccaaggtccacccaagttcaggccaattaggattagccttgaagaaaaaccagccccagacgctattagcgatctccttgctagcgtagatagtgaagaagtgcgccagtactgcagggatcaaggctggattattcctgaagttcccaccaatgtagagcggcaccttaatagagcggtgcttgtcatgcaatccatcgccacagtagtggcagttgtctcgttggtgtatgtcatctacaagctctttgcagggttccagggtgcgtattctggtgctcctaagcaagtgcttaagaaacctgcccttcgcacagcaacagtacagggcccgagccttgactttgctctctccctactgagaaggaacatcagacaagttcaaacagaccaggggcatttcaccatgttgggtgttagggatcgcttagcagtccttccacgtcactcacaacctggcaaaactatttgggttgaacacaaactcgtgaacgtccttgatgcagttgaactggtggatgagcaaggagtcaacctggaattgaccctcattactcttgacaccaacgagaagtttagggatattaccaagttcatcccggaaaatattagcactgctagtgatgccaccctagtgatcaacacggagcatatgccatcaatgtttgtcccggtgggtgacgttgtgcagtatggctttttgaatctcagtggtaagcctacccatcgcaccatgatgtacaactttcctactaaagcagggcagtgtggaggagtagtgacatctgttgggaaggttgtcggtattcacattggtggcaatggcagacagggtttttgcgcaggcctcaaaaggagttactttgctagtgaacaaggagagatccaatgggttaagcccaacaaagaaactggaagactcaacattaatggaccaacccgcaccaaattagaacctagtgtattccatgacatcttcgagggaaataaagagccagctgtcttgcacagtaaagacccccgacttgaagtagattttgaacaggccctgttctctaagtatgtgggaaacacactacatgagcctgacgagtacatcaaagaggcggctcttcattacgcgaaccaattgaagcaattagaaattaatacctctcaaatgagcatggaagaggcctgctacggtactgagaatcttgaggctattgatcttcacactagtgcaggatacccttatagtgccttggggataaagaaaagagacatcttagaccctaccaccagggacgtgagtaaaatgaagttctacatggacaagtatggtcttgatcttccttactccacttatgtcaaggacgagctacgctcgattgataaaattaagaaagggaagtcccgtctgatcgaggctagtagtctaaatgattcagtgtacctcagaatggctttcggacatttgtatgaggctttccacgcaaatcctgggacaataactggatcagccgtggggtgtaaccctgacacattctggagcaagctgccaattttgctccctggttcactctttgctttcgactactcaggttatgatgccagccttagccctgtctggttcagagcattagaattagttctcagggagatagggtatagtgaagaggcggtctcactcattgagggaatcaaccacacacaccatgtgtatcgtaataagacctattgtgtgcttggtgggatgccctcaggttgttcgggaacatccattttcaactcaatgatcaacaacattatcatcagagcactgctcataaaaacatttaagggcattgacttggatgaactcaacatggtcgcttatggagacgatgtgctcgctagctatcccttcccaattgattgcttggaactagcaaagactggtaaggagtatggtttgaccatgactcctgctgataaatctccttgcttcaatgaggttaattggggtaatgcgaccttccttaaaaggggctttttgcccgatgaacagtttccgttcttgattcaccccactatgccaatgagggagatccatgagtccattcgatggaccaaggacgcccgaaacatggcataatggtaaacaagaatatgagaagtttgtgagcacaattaggtctgttccagtgggaagagcgttggctattccaaattatgaaaaccttagacgcaattggctcgagttattttagaggttatacacacctcaaccccaccagaaatctggtcgtgaatgtgactggtgggggtaaatttgttataaccagaatagcaaaaaaaaaaaaaaaaaaaaaaaaa

SEQ ID NO: 20 - DNA, 7395 bp, Artificial Sequence
  Synthetic sequence
ttaaaacagcctgtgggttgcacccacccacagggcccactgggcgcaagcactctggtaccccggtacctttgtgtgcctgttttatacccccccccccaatgaaacttagaagcagcaaaccacgatcaatagtaggcataacgctccagttatgtcttgatcaagcacttctgtttccccggactgagtatcaatagactgctcgcgcggttgaaggagaaaacgttcgttatccggctagctacttcggaaaacctagtaacaccatgaaagttgcggagagcttcgttcagcactcccccagtgtagatcaggtcgatgagtcaccgcattccccacgggcgaccgtggcggtggctgcgttggcggcctgcccatggggtaacccatggggcgctctaatacggacatggtgtgaagagtctactgagctagttagtagtcctccggcccctgaatgcggctaatcccaactgcggagcacacgcccacaagccagcgggtagtgtgtcgtaacgggtaactctgcagcggaaccgactactttgggtgtccgtgtttccttttatctttatattggctgcttatggtgacaattaaagaattgttaccatatagctattggattggccatccggtgtgcaacagagcaattatttaccaatttgttggttttgtaccattaaccttgaattctgtgaccacccttaattatattttgacccttaacgcagctaaacatgggttcgcaagtgtctacacagcgctccggttctcatgaaaactcaaactcagccactgagggttctaccataaactacaccaccatcaattactacaaagactcttatgctgccacagcaggcaaacagagtctcaagcaggatccagacaagtttgcaaatcctgttaaagacatcttcactgaaatggcagcgccattgaagtccccatccgctgaggcatgtggatacagtgatcgagtggcacaattaactattggcaactccaccatcaccacgcaagaagcggctaacatcatagtcggttatggtgagtggccttcttactgctcagattctgacgctacagcagtggataaaccaacgcgcccggatgtttcagtgaataggttttacacgttagacactaaattatgggagaaatcgtccaagggatggtactggaagttcccggatgtgttaactgaaactggggtttttgggcaaaatgcacaattccactacctctaccgatcagggttctgcatccacgtgcagtgtaatgctagtaaattccaccaaggagcactcctagtcgctgtcctaccagagtatgtcattgggacagtagcaggcggcacagggacggaagatacccaccccccttataagcagacccaacccggtgccgatggcttcgagctgcagcacccgtacgtgcttgacgctggcatcccaatatcacagttaacagtgtgcccacaccagtggattaatttgaggaccaacaattgtgctacaataatagtgccatacattaacgcactgccttttgattctgccttgaaccattgcaactttggcctgctagttgtgcctattagtccactagactacgaccaaggagcgacgccagtaatccctataactatcacattggccccaatgtgttctgagttcgcaggtcttaggcaggcagtcacgcaagggttccctaccgagctaaaacctggcacaaatcaattcttaaccaccgatgatggtgtctcagcacctattctaccaaacttccaccccaccccgtgtatccacatacctggtgaagtgaggaatttgctagagttatgccaggtggaaaccattctggaggttaataatgtgcccacgaatgccactagcttgatggagagactgcgcttcccggtctcagcacaagcagggaaaggtgaactgtgtgcggtgtttagagccgatcctgggcgaaacggaccatggcaatccaccttactgggtcagttgtgcgggtactacacccaatggtcaggatcattggaggtcaccttcatgtttactggatccttcatggctaccggcaagatgctcatagcctatacaccgccaggaggtcctctgcccaaggaccgggcgaccgccatgttgggcacgcacgtcatctgggattttgggctgcaatcgtctgttacccttgtaataccatggatcagcaacactcattatagagcacatgcccgagatggagtgtttgactactacaccacagggttggtcagtatatggtatcagacaaattacgtggttccaattggtgcgcccaacacagcctatataatagcactagcggcagcccaaaagaacttcactatgaaattgtgcaaggatgctagtgatatcttgcagacgggcaccatccagggagatagggtggcagatgtaattgaaagctccataggagatagcgtgagcagagccctcactcacgctctaccagcacccacaggtcagaacacacaggtgagcagtcatcgactggatacgggcaaggttccagcactccaagctgctgaaattggagcatcatcaaatgctagtgacgagagtatgattgagacacgctgtgtcctcaactcgcacagtacagcagagaccactcttgatagtttcttcagcagggcgggattagttggagagatagatctccctcttgagggcacaactaacccaaatggttatgccaactgggacatagatataacaggttacgcgcaaatgcgtagaaaggtagagctcttcacctacatgcgctttgatgcagagttcacttttgttgcgtgtacacctaccggggaagttgttccacaactgctccaatatatgtttgtgccacctggagccccaaagccagattctagggaatcccttgcatggcaaaccgccactaacccctcagtttttgtcaagctgtcagaccctccagcacaggtttcagtgccattcatgtcacctgcgagtgcttatcaatggttttatgacggatatcccacgttcggagaacacaaacaggagaaagatcttgaatatggggcatgtcctaataacatgatgggcacgttctcagtgcggactgtagggtcctccaagtccaagtaccctctagtgattaggatttacatgagaatgaagcacgtcagggcgtggatacctcgcccgatgcgtaaccagaactacctattcaaagccaatccaaattatgctggcaactccgttaagccaactggtgccagtcgcacagcgatcaccactcttgggaaatttggacaacagtctggggctatttatgtgggcaactttagggtggtcaaccgacatcttgccactcacaatgattgggcaaatcttgtttgggaagacagctctcgcgacttgctcgtgtcatccactaccgcccaaggttgcgacacgattgcccgctgcgattgccagacaggggtgtactactgtaactcgatgagaaaacactacccagttagtttttcaaaacccagcctgatctatgtagaggctagcgagtattacccagccaggtaccaatcacatctcatgctcgcacagggtcactcagaacctggtgattgcggtggtatccttaggtgccaacatggcgtcgtcggcatagtgtccactggtggtaatgggcttgttggctttgcagacgtcagagacctcttgtggttagatgaagaagccatggaacagggcgtgtccgactacatcaagggtctcggggatgcttttggaacaggctttactgacgcagtctcaagggaggttgaagctctcaagaactatctcatagggtctgaaggagcagttgagaaaattttgaaaaatctaattaaactaatctctgcactggtgattgtgatcagaagtgattatgatatggttaccctcactgcgaccttggcgctgataggttgtcatggcagtccgtgggcttggatcaaagccaaaacagcctccatcttaggtatccctattgctcaaaagcagagcgcttcctggctcaagaagttcaatgatatggccaacgccgctaaggggttagagtgggtttccaacaagatcagcaaatttattgattggcttaaggagaagatagtaccagcagctagggagaaggttgaattcctaaataacttgaaacagctgccactgctagagaatcagatctcaaacttggaacaatctgctgcctcacaagaggaccttgaaatcatgtttgggaatgtatcgtacctagctcacttctgccgcaagttccaaccgctatacgccacggaagctaggagagtctatgccctggagaagaggatgaataactatatgcagttcaagagcaaacaccgaattgaacctgtatgtctcatcattaggggctcaccaggcactgggaagtctctagccactggtattattgctcgagcaatcgctgataagtaccactccagcgtgtactcgctcccaccagacccagatcattttgacggttacaagcaacaggtggttaccgtgatggatgatctgtgccaaaaccccgacggaaaggatatgtctttattctgtcaaatggtatccaccgtagacttcattccaccaatggcttccctcgaggagaagggagtttccttcacctctaagtttgtcatcgcatccactaatgccagtaatatcatagtaccaacagtgtctgattccgacgctattcgccgcaggttctacatggactgtgacattgaagtgacagactcatacaaaacagatctaggtagactggatgcagggcgagccgctaaactgtgctctgagaacaacactgcaaatttcaaacgttgtagcccgttagtgtgcgggaaagctatccaacttagagatagaaagtctaaagtcagatacagtgtggatacggtggtttcagaacttattagggaatacagcaataggtccgctattggcaacacaatcgaggctcttttccaaggtccacccaagttcaggccaattaggattagccttgaagaaaaaccagccccagacgctattagcgatctccttgctagcgtagatagtgaagaagtgcgccagtactgcagggatcaaggctggattattcctgaagttcccaccaatgtagagcggcaccttaatagagcggtgcttgtcatgcaatccatcgccacagtagtggcagttgtctcgttggtgtatgtcatctacaagctctttgcagggttccagggtgcgtattctggtgctcctaagcaagtgcttaagaaacctgcccttcgcacagcaacagtacagggcccgagccttgactttgctctctccctactgagaaggaacatcagacaagttcaaacagaccaggggcatttcaccatgttgggtgttagggatcgcttagcagtccttccacgtcactcacaacctggcaaaactatttgggttgaacacaaactcgtgaacgtccttgatgcagttgaactggtggatgagcaaggagtcaacctggaattgaccctcattactcttgacaccaacgagaagtttagggatattaccaagttcatcccggaaaatattagcactgctagtgatgccaccctagtgatcaacacggagcatatgccatcaatgtttgtcccggtgggtgacgttgtgcagtatggctttttgaatctcagtggtaagcctacccatcgcaccatgatgtacaactttcctactaaagcagggcagtgtggaggagtagtgacatctgttgggaaggttgtcggtattcacattggtggcaatggcagacagggtttttgcgcaggcctcaaaaggagttactttgctagtgaacaaggagagatccaatgggttaagcccaacaaagaaactggaagactcaacattaatggaccaacccgcaccaaattagaacctagtgtattccatgacatcttcgagggaaataaagagccagctgtcttgcacagtaaagacccccgacttgaagtagattttgaacaggccctgttctctaagtatgtgggaaacacactacatgagcctgacgagtacatcaaagaggcggctcttcattacgcgaaccaattgaagcaattagaaattaatacctctcaaatgagcatggaagaggcctgctacggtactgagaatcttgaggctattgatcttcacactagtgcaggatacccttatagtgccttggggataaagaaaagagacatcttagaccctaccaccagggacgtgagtaaaatgaagttctacatggacaagtatggtcttgatcttccttactccacttatgtcaaggacgagctacgctcgattgataaaattaagaaagggaagtcccgtctgatcgaggctagtagtctaaatgattcagtgtacctcagaatggctttcggacatttgtatgaggctttccacgcaaatcctgggacaataactggatcagccgtggggtgtaaccctgacacattctggagcaagctgccaattttgctccctggttcactctttgctttcgactactcaggttatgatgccagccttagccctgtctggttcagagcattagaattagttctcagggagatagggtatagtgaagaggcggtctcactcattgagggaatcaaccacacacaccatgtgtatcgtaataagacctattgtgtgcttggtgggatgccctcaggttgttcgggaacatccattttcaactcaatgatcaacaacattatcatcagagcactgctcataaaaacatttaagggcattgacttggatgaactcaacatggtcgcttatggagacgatgtgctcgctagctatcccttcccaattgattgcttggaactagcaaagactggtaaggagtatggtttgaccatgactcctgctgataaatctccttgcttcaatgaggttaattggggtaatgcgaccttccttaaaaggggctttttgcccgatgaacagtttccgttcttgattcaccccactatgccaatgagggagatccatgagtccattcgatggaccaaggacgcccgaaaatggcataatggtaaacaagaatatgagaagtttgtgagcacaattaggtctgttccagtgggaagagcgttggctattccaaattatgaaaaccttagacgcaattggctcgagttattttagaggttatacacacctcaaccccaccagaaatctggtcgtgaatgtgactggtgggggtaaatttgttataaccagaatagcaaaaaaaaaaaaaaaaaaaaaaaaa

SEQ ID NO: 21 - DNA, 7377 bp, Artificial Sequence
  Synthetic sequence
ttaaaacagcctgtgggttgcacccacccacagggcccactgggcgcaagcactctggtaccccggtacctttgtgtgcctgttttatacccccccccccaatgaaacttagaagcagcaaaccacgatcaatagtaggcataacgctccagttatgtcttgatcaagcacttctgtttccccggactgagtatcaatagactgctcgcgcggttgaaggagaaaacgttcgttatccggctagctacttcggaaaacctagtaacaccatgaaagttgcggagagcttcgttcagcactcccccagtgtagatcaggtcgatgagtcaccgcattccccacgggcgaccgtggcggtggctgcgttggcggcctgcccatggggtaacccatggggcgctctaatacggacatggtgtgaagagtctactgagctagttagtagtcctccggcccctgaatgcggctaatcccaactgcggagcacacgcccacaagccagcgggtagtgtgtcgtaacgggtaactctgcagcggaaccgactactttgggtgtccgtgtttccttttatctttatattggctgcttatggtgacaattaaagaattgttaccatatagctattggattggccatccggtgtgcaacagagcaattatttaccaatttgttggttttgtaccattaaccttgaattctgtgaccacccttaattatattttgacccttaacgcagctaaacatgggttcgcaagtgtctacacagcgctccggttctcatgaaaactcaaactcagccactgagggttctaccataaactacaccaccatcaattactacaaagactcttatgctgccacagcaggcaaacagagtctcaagcaggatccagacaagtttgcaaatcctgttaaagacatcttcactgaaatggcagcgccattgaagtccccatccgctgaggcatgtggatacagtgatcgagtggcacaattaactattggcaactccaccatcaccacgcaagaagcggctaacatcatagtcggttatggtgagtggccttcttactgctcagattctgacgctacagcagtggataaaccaacgcgcccggatgtttcagtgaataggttttacacgttagacactaaattatgggagaaatcgtccaagggatggtactggaagttcccggatgtgttaactgaaactggggtttttgggcaaaatgcacaattccactacctctaccgatcagggttctgcatccacgtgcagtgtaatgctagtaaattccaccaaggagcactcctagtcgctgtcctaccagagtatgtcattgggacagtagcaggcggcacagggacggaagatacccaccccccttataagcagacccaacccggtgccgatggcttcgagctgcagcacccgtacgtgcttgacgctggcatcccaatatcacagttaacagtgtgcccacaccagtggattaatttgaggaccaacaattgtgctacaataatagtgccatacattaacgcactgccttttgattctgccttgaaccattgcaactttggcctgctagttgtgcctattagtccactagactacgaccaaggagcgacgccagtaatccctataactatcacattggccccaatgtgttctgagttcgcaggtcttaggcaggcagtcacgcaagggttccctaccgagctaaaacctggcacaaatcaattcttaaccaccgatgatggtgtctcagcacctattctaccaaacttccaccccaccccgtgtatccacatacctggtgaagtgaggaatttgctagagttatgccaggtggaaaccattctggaggttaataatgtgcccacgaatgccactagcttgatggagagactgcgcttcccggtctcagcacaagcagggaaaggtgaactgtgtgcggtgtttagagccgatcctgggcgaaacggaccatggcaatccaccttactgggtcagttgtgcgggtactacacccaatggtcaggatcattggaggtcaccttcatgtttactggatccttcatggctaccggcaagatgctcatagcctatacaccgccaggaggtcctctgcccaaggaccgggcgaccgccatgttgggcacgcacgtcatctgggattttgggctgcaatcgtctgttacccttgtaataccatggatcagcaacactcattatagagcacatgcccgagatggagtgtttgactactacaccacagggttggtcagtatatggtatcagacaaattacgtggttccaattggtgcgcccaacacagcctatataatagcactagcggcagcccaaaagaacttcactatgaaattgtgcaaggatgctagtgatatcttgcagacgggcaccatccagggagatagggtggcagatgtaattgaaagctccataggagatagcgtgagcagagccctcactcacgctctaccagcacccacaggtcagaacacacaggtgagcagtcatcgactggatacgggcaaggttccagcactccaagctgctgaaattggagcatcatcaaatgctagtgacgagagtatgattgagacacgctgtgtcctcaactcgcacagtacagcagagaccactcttgatagtttcttcagcagggcgggattagttggagagatagatctccctcttgagggcacaactaacccaaatggttatgccaactgggacatagatataacaggttacgcgcaaatgcgtagaaaggtagagctcttcacctacatgcgctttgatgcagagttcacttttgttgcgtgtacacctaccggggaagttgttccacaactgctccaatatatgtttgtgccacctggagccccaaagccagattctagggaatcccttgcatggcaaaccgccactaacccctcagtttttgtcaagctgtcagaccctccagcacaggtttcagtgccattcatgtcacctgcgagtgcttatcaatggttttatgacggatatcccacgttcggagaacacaaacaggagaaagatcttgaatatggggcatgtcctaataacatgatgggcacgttctcagtgcggactgtagggtcctccaagtccaagtaccctctagtgattaggatttacatgagaatgaagcacgtcagggcgtggatacctcgcccgatgcgtaaccagaactacctattcaaagccaatccaaattatgctggcaactccgttaagccaactggtgccagtcgcacagcgatcaccactcttgggaaatttggacaacagtctggggctatttatgtgggcaactttagggtggtcaaccgacatcttgccactcacaatgattgggcaaatcttgtttgggaagacagctctcgcgacttgctcgtgtcatccactaccgcccaaggttgcgacacgattgcccgctgcgattgccagacaggggtgtactactgtaactcgatgagaaaacactacccagttagtttttcaaaacccagcctgatctatgtagaggctagcgagtattacccagccaggtaccaatcacatctcatgctcgcacagggtcactcagaacctggtgattgcggtggtatccttaggtgccaacatggcgtcgtcggcatagtgtccactggtggtaatgggcttgttggctttgcagacgtcagagacctcttgtggttagatgaagaagccatggaacagggcgtgtccgactacatcaagggtctcggggatgcttttggaacaggctttactgacgcagtctcaagggaggttgaagctctcaagaactatctcatagggtctgaaggagcagttgagaaaattttgaaaaatctaattaaactaatctctgcactggtgattgtgatcagaagtgattatgatatggttaccctcactgcgaccttggcgctgataggttgtcatggcagtccgtgggcttggatcaaagccaaaacagcctccatcttaggtatccctattgctcaaaagcagagcgcttcctggctcaagaagttcaatgatatggccaacgccgctaaggggttagagtgggtttccaacaagatcagcaaatttattgattggcttaaggagaagatagtaccagcagctagggagaaggttgaattcctaaataacttgaaacagctgccactgctagagaatcagatctcaaacttggaacaatctgctgcctcacaagaggaccttgaaatcatgtttgggaatgtatcgtacctagctcacttctgccgcaagttccaaccgctatacgccacggaagctaggagagtctatgccctggagaagaggatgaataactatatgcagttcaagagcaaacaccgaattgaacctgtatgtctcatcattaggggctcaccaggcactgggaagtctctagccactggtattattgctcgagcaatcgctgataagtaccactccagcgtgtactcgctcccaccagacccagatcattttgacggttacaagcaacaggtggttaccgtgatggatgatctgtgccaaaaccccgacggaaaggatatgtctttattctgtcaaatggtatccaccgtagacttcattccaccaatggcttccctcgaggagaagggagtttccttcacctctaagtttgtcatcgcatccactaatgccagtaatatcatagtaccaacagtgtctgattccgacgctattcgccgcaggttctacatggactgtgacattgaagtgacagactcatacaaaacagatctaggtagactggatgcagggcgagccgctaaactgtgctctgagaacaacactgcaaatttcaaacgttgtagcccgttagtgtgcgggaaagctatccaacttagagatagaaagtctaaagtcagatacagtgtggatacggtggtttcagaacttattagggaatacagcaataggtccgctattggcaacacaatcgaggctcttttccaaggtccacccaagttcaggccaattaggattagccttgaagaaaaaccagccccagacgctattagcgatctccttgctagcgtagatagtgaagaagtgcgccagtactgcagggatcaaggctggattattcctgaagttcccaccaatgtagagcggcaccttaatagagcggtgcttgtcatgcaatccatcgccacagtagtggcagttgtctcgttggtgtatgtcatctacaagctctttgcagggttccagggtgcgtattctggtgctcctaagcaagtgcttaagaaacctgcccttcgcacagcaacagtacagggcccgagccttgactttgctctctccctactgagaaggaacatcagacaagttcaaacagaccaggggcatttcaccatgttgggtgttagggatcgcttagcagtccttccacgtcactcacaacctggcaaaactatttgggttgaacacaaactcgtgaacgtccttgatgcagttgaactggtggatgagcaaggagtcaacctggaattgaccctcattactcttgacaccaacgagaagtttagggatattaccaagttcatcccggaaaatattagcactgctagtgatgccaccctagtgatcaacacggagcatatgccatcaatgtttgtcccggtgggtgacgttgtgcagtatggctttttgaatctcagtggtaagcctacccatcgcaccatgatgtacaactttcctactaaagcagggcagtgtggaggagtagtgacatctgttgggaaggttgtcggtattcacattggtggcaatggcagacagggtttttgcgcaggcctcaaaaggagttactttgctagtgaacaaggagagatccaatgggttaagcccaacaaagaaactggaagactcaacattaatggaccaacccgcaccaaattagaacctagtgtattccatgacatcttcgagggaaataaagagccagctgtcttgcacagtaaagacccccgacttgaagtagattttgaacaggccctgttctctaagtatgtgggaaacacactacatgagcctgacgagtacatcaaagaggcggctcttcattacgcgaaccaattgaagcaattagaaattaatacctctcaaatgagcatggaagaggcctgctacggtactgagaatcttgaggctattgatcttcacactagtgcaggatacccttatagtgccttggggataaagaaaagagacatcttagaccctaccaccagggacgtgagtaaaatgaagttctacatggacaagtatggtcttgatcttccttactccacttatgtcaaggacgagctacgctcgattgataaaattaagaaagggaagtcccgtctgatcgaggctagtagtctaaatgattcagtgtacctcagaatggctttcggacatttgtatgaggctttccacgcaaatcctgggacaataactggatcagccgtggggtgtaaccctgacacattctggagcaagctgccaattttgctccctggttcactctttgctttcgactactcaggttatgatgccagccttagccctgtctggttcagagcattagaattagttctcagggagatagggtatagtgaagaggcggtctcactcattgagggaatcaaccacacacaccatgtgtatcgtaataagacctattgtgtgcttggtgggatgccctcaggttgttcgggaacatccattttcaactcaatgatcaacaacattatcatcagagcactgctcataaaaacatttaagggcattgacttggatgaactcaacatggtcgcttatggagacgatgtgctcgctagctatcccttcccaattgattgcttggaactagcaaagactggtaaggagtatggtttgaccatgactcctgctgataaatctccttgcttcaatgaggttaattggggtaatgcgaccttccttaaaaggggctttttgcccgatgaacagtttccgttcttgattcaccccactatgccaatgagggagatccatgagtccattcgatggaccaaggacgcccgaaacactcaagatcatgtgcggtccttgtgcctcctagcatggcataatggtaaacaagaatatgagaagtttgtgaaccttagacgcaattggctcgagttattttagaggttatacacacctcaaccccaccagaaatctggtcgtgaatgtgactggtgggggtaaatttgttataaccagaatagcaaaaaaaaaaaaaaaaaaaaaaaaa

SEQ ID NO: 22 - DNA, 927 bp, Artificial Sequence
  Synthetic sequence
agttgttgatctgtgtgagtcagactgcgacagttcgagtctgaagcgagagctaacaacagtatcaacaggtttaatttggatttggaaacgagagtttctggtcatgaaaaacccaaagaagaaatccggaggattccggattgtcaatatgctaaaacgcggagtagcccgtgtaaaccccttgggaggtttgaagaggttgccagccggacttctgctgggtcatggacccatcagaatggttttggcgatactagcctttttgagatttacagcaatcaagccatcactgggccttatcaacagatggggttccgtggggaaaaaagaggctatggaaataataaagaagttcaagaaagatcttgctgccatgttgagaataatcaatgctaggaaagagaggaagagacgtggcgcagacaccagcatcggaatcattggcctcctgctgactacagccatggcagcagagatcactagacgcgggagtgcatactacatgtacttggataggagcgatgccgggaaggccatttcgtttgctaccacattgggagtgaacaagtgccacgtacagatcatggacctcgggcacatgtgtgacgccaccatgagttatgagtgccctatgctggatgagggagtggaaccagatgatgtccaaaaaaccccacgcgcttggaagcgcaggatgggaaaagaaggtggcgaccttccccacccttcaatctggggcctgaactggagactagctgtgaatctccagcagagggactagtggttagaggagaccccccggaaaacgcaaaacagcatattgacgctgggaaagaccagagactccatgagtttccaccacgctggccgccaggcacagatcgccgaacttcggcggccggtgtggggaaatccatggtttct

SEQ ID NO: 23 - DNA, 1170 bp, Artificial Sequence
  Synthetic sequence
agttgttgatctgtgtgagtcagactgcgacagttcgagtctgaagcgagagctaacaacagtatcaacaggtttaatttggatttggaaacgagagtttctggtcatgaaaaacccaaagaagaaatccggaggattccggattgtcaatatgctaaaacgcggagtagcccgtgtaaaccccttgggaggtttgaagaggttgccagccggacttctgctgggtcatggacccatcagaatggttttggcgatactagcctttttgagatttacagcaatcaagctgcctgtcttgcaaaatcatatgcgcagatgtggcagctcctttatttccacagaagagaccttcgactgatggctaatgccatttgctcggctgtgccagttgactgggtaccaactgggagaaccacctggtcaatccatggaaagggagaatggatgaccactgaggacatgctcatggtgtggaatagagtgtggattgaggagaacgaccatatggaggacaagactcctgtaacaaaatggacagacattccctatctaggaaaaagggaggacttatggtgtggatcccttatagggcacagaccccgcaccacttgggctgaaaacatcaaagacacagtcaacatggtgcgcaggatcataggtgatgaagaaaagtacatggactatctatccacccaagtccgctacttgggtgaggaagggtccacacccggagtgttgtaagcaccaattttagtgttgtcaggcctgctagtcagccacagtttggggaaagctgtgcagcctgtaacccccccaggagaagctgggaaaccaagctcatagtcaggccgagaacgccatggcacggaagaagccatgctgcctgtgagcccctcagaggacactgagtcaaaaaaccccacgcgcttggaagcgcaggatgggaaaagaaggtggcgaccttccccacccttcaatctggggcctgaactggagactagctgtgaatctccagcagagggactagtggttagaggagaccccccggaaaacgcaaaacagcatattgacgctgggaaagaccagagactccatgagtttccaccacgctggccgccaggcacagatcgccgaacttcggcggccggtgtggggaaatccatggtttct

SEQ ID NO: 24 - DNA, 1296 bp, Artificial Sequence
  Synthetic sequence
agttgttgatctgtgtgagtcagactgcgacagttcgagtctgaagcgagagctaacaacagtatcaacaggtttaatttggatttggaaacgagagtttctggtcatgaaaaacccaaagaagaaatccggaggattccggattgtcaatatgctaaaacgcggagtagcccgtgtaaaccccttgggaggtttgaagaggttgccagccggacttctgctgggtcatggacccatcagaatggttttggcgatactagcctttttgagatttacagcaatcaagccatcactgggccttatcaacagatggggttccgtggggaaaaaagaggctatggaaataataaagaagttcaagaaagatcttgctgccatgttgagaataatcaatgctaggaaagagaggaagagacgtggcgcagacaccagcatcggaatcattggcctcctgctgactacagccatggcagcagagatcactagacgcgggagtgcatactacatgtacttggataggagcgatgccgggaaggccatttcgtttgctaccacattgggagtgaacaagtgccacgtacagatcatggacctcgggcacatgtgtgacgccaccatgagttatgagtgccctatgctggatgagggagtggaaccagatgatgtcgattgctggtgcaacacgacatcaacttgggttgtgtacggaacctgtcatcacaaaaaaggtgaggcacggcgatctagaagagccgtgacgctcccttctcactctacaaggaagttgcaaacgaaaagtacatggactatctatccacccaagtccgctacttgggtgaggaagggtccacacccggagtgttgtaagcaccaattttagtgttgtcaggcctgctagtcagccacagtttggggaaagctgtgcagcctgtaacccccccaggagaagctgggaaaccaagctcatagtcaggccgagaacgccatggcacggaagaagccatgctgcctgtgagcccctcagaggacactgagtcaaaaaaccccacgcgcttggaagcgcaggatgggaaaagaaggtggcgaccttccccacccttcaatctggggcctgaactggagactagctgtgaatctccagcagagggactagtggttagaggagaccccccggaaaacgcaaaacagcatattgacgctgggaaagaccagagactccatgagtttccaccacgctggccgccaggcacagatcgccgaacttcggcggccggtgtggggaaatccatggtttct

SEQ ID NO: 25 - DNA, 1731 bp, Artificial Sequence
  Synthetic sequence
agttgttgatctgtgtgagtcagactgcgacagttcgagtctgaagcgagagctaacaacagtatcaacaggtttaatttggatttggaaacgagagtttctggtcatgaaaaacccaaagaagaaatccggaggattccggattgtcaatatgctaaaacgcggagtagcccgtgtaaaccccttgggaggtttgaagaggttgccagccggacttctgctgggtcatggacccatcagaatggttttggcgatactagcctttttgagatttacagcaatcaagccatcactgggccttatcaacagatggggttccgtggggaaaaaagaggctatggaaataataaagaagttcaagaaagatcttgctgccatgttgagaataatcaatgctaggaaagagaggaagagacgtggcgcagacaccagcatcggaatcattggcctcctgctgactacagccatggcagcagagatcactagacgcgggagtgcatactacatgtacttggataggagcgatgccgggaaggccatttcgtttgctaccacattgggagtgaacaagtgccacgtacagatcatggacctcgggcacatgtgtgacgccaccatgagttatgagtgccctatgctggatgagggagtggaaccagatgatgtcgattgctggtgcaacacgacatcaacttgggttgtgtacggaacctgtcatcacaaaaaaggtgaggcacggcgatctagaagagccgtgacgctcccttctcactctacaaggaagttgcaaacgcggtcgcagacctggttagaatcaagagaatacacgaagcacttgatcaaggttgaaaactggatattcaggaaccccgggtttgcgctagtggccgttgccattgcctggcttttgggaagctcgacgagccaaaaagtcatatacttggtcatgatactgctgattgccccggcatacagtatcaggtgcattggagtcagcaatagagacttcgtggagggcatgtcaggtgggacctgggttgagtgtggattgaggagaacgaccatatggaggacaagactcctgtaacaaaatggacagacattccctatctaggaaaaagggaggacttatggtgtggatcccttatagggcacagaccccgcaccacttgggctgaaaacatcaaagacacagtcaacatggtgcgcaggatcataggtgatgaagaaaagtacatggactatctatccacccaagtccgctacttgggtgaggaagggtccacacccggagtgttgtaagcaccaattttagtgttgtcaggcctgctagtcagccacagtttggggaaagctgtgcagcctgtaacccccccaggagaagctgggaaaccaagctcatagtcaggccgagaacgccatggcacggaagaagccatgctgcctgtgagcccctcagaggacactgagtcaaaaaaccccacgcgcttggaagcgcaggatgggaaaagaaggtggcgaccttccccacccttcaatctggggcctgaactggagactagctgtgaatctccagcagagggactagtggttagaggagaccccccggaaaacgcaaaacagcatattgacgctgggaaagaccagagactccatgagtttccaccacgctggccgccaggcacagatcgccgaacttcggcggccggtgtggggaaatccatggtttct

SEQ ID NO: 26 - DNA, 1873 bp, Artificial Sequence
  Synthetic sequence
agttgttgatctgtgtgagtcagactgcgacagttcgagtctgaagcgagagctaacaacagtatcaacaggtttaatttggatttggaaacgagagtttctggtcatgaaaaacccaaagaagaaatccggaggattccggattgtcaatatgctaaaacgcggagtagcccgtgtaaaccccttgggaggtttgaagaggttgccagccggacttctgctgggtcatggacccatcagaatggttttggcgatactagcctttttgagatttacagcaatcaagccatcactgggccttatcaacagatggggttccgtggggaaaaaagaggctatggaaataataaagaagttcaagaaagatcttgctgccatgttgagaataatcaatgctaggaaagagaggaagagacgtggcgcagacaccagcatcggaatcattggcctcctgctgactacagccatggcagcagagatcactagacgcgggagtgcatactacatgtacttggataggagcgatgccgggaaggccatttcgtttgctaccacattgggagtgaacaagtgccacgtacagatcatggacctcgggcacatgtgtgacgccaccatgagttatgagtgccctatgctggatgagggagtggaaccagatgatgtcgattgctggtgcaacacgacatcaacttgggttgtgtacggaacctgtcatcacaaaaaaggtgaggcacggcgatctagaagagccgtgacgctcccttctcactctacaaggaagttgcaaacgcggtcgcagacctggttagaatcaagagaatacacgaagcacttgatcaaggttgaaaactggatattcaggaaccccgggtttgcgctagtggccgttgccattgcctggcttttgggaagctcgacgagccaaaaagtcatatacttggtcatgatactgctgattgccccggcatacagtatcaggtgcattggagtcagcaatagagacttcgtggagggcatgtcaggtgggacctgggttgatgttgtcttggaacatggaggctgcgttaccgtgatggcacaggacaagccaacagttgacatagagttggtcacgacgacggttagtaacatggccgaggtaagatcctattgctacgaggcatcgatatcggacatggcttcggacagtcgttgcccaacacaaggtgaggcctaccttgacaagcaatcagacactcaatatgtctgcaaaagaacattagtggacagaggttggggaaacggttgtggactttttggcaaagggagcttggtgacatgtgccaagtttacgtgttctaagaagatgaccgggaagagcattcaaccggaaaatctggagtatcggataatgctatcagtgcatggctcccagcatagcgggatgattgtcaatgatacaggatatgaaactgtgttgtcaggcctgctagtcagccacagtttggggaaagctgtgcagcctgtaacccccccaggagaagctgggaaaccaagctcatagtcaggccgagaacgccatggcacggaagaagccatgctgcctgtgagcccctcagaggacactgagtcaaaaaaccccacgcgcttggaagcgcaggatgggaaaagaaggtggcgaccttccccacccttcaatctggggcctgaactggagactagctgtgaatctccagcagagggactagtggttagaggagaccccccggaaaacgcaaaacagcatattgacgctgggaaagaccagagactccatgagtttccaccacgctggccgccaggcacagatcgccgaacttcggcggccggtgtggggaaatccatggtttct

SEQ ID NO: 27 - DNA, 4862 bp, Artificial Sequence
  Synthetic sequence
agttgttgatctgtgtgagtcagactgcgacagttcgagtctgaagcgagagctaacaacagtatcaacaggtttaatttggatttggaaacgagagtttctggtcatgaaaaacccaaagaagaaatccggaggattccggattgtcaatatgctaaaacgcggagtagcccgtgtaaaccccttgggaggtttgaagaggttgccagccggacttctgctgggtcatggacccatcagaatggttttggcgatactagcctttttgagatttacagcaatcaagccatcactgggccttatcaacagatggggttccgtggggaaaaaagaggctatggaaataataaagaagttcaagaaagatcttgctgccatgttgagaataatcaatgctaggaaagagaggaagagacgtggcgcagacaccagcatcggaatcattggcctcctgctgactacagccatggcagcagagatcactagacgcgggagtgcatactacatgtacttggataggagcgatgccgggaaggccatttcgtttgctaccacattgggagtgaacaagtgccacgtacagatcatggacctcgggcacatgtgtgacgccaccatgagttatgagtgccctatgctggatgagggagtggaaccagatgatgtcgattgctggtgcaacacgacatcaacttgggttgtgtacggaacctgtcatcacaaaaaaggtgaggcacggcgatctagaagagccgtgacgctcccttctcactctacaaggaagttgcaaacgcggtcgcagacctggttagaatcaagagaatacacgaagcacttgatcaaggttgaaaactggatattcaggaaccccgggtttgcgctagtggccgttgccattgcctggcttttgggaagctcgacgagccaaaaagtcatatacttggtcatgatactgctgattgccccggcatacagtatcaggtgcattggagtcagcaatagagacttcgtggagggcatgtcaggtgggacctgggttgatgttgtcttggaacatggaggctgcgttaccgtgatggcacaggacaagccaacagttgacatagagttggtcacgacgacggttagtaacatggccgaggtaagatcctattgctacgaggcatcgatatcggacatggcttcggacagtcgttgcccaacacaaggtgaggcctaccttgacaagcaatcagacactcaatatgtctgcaaaagaacattagtggacagaggttggggaaacggttgtggactttttggcaaagggagcttggtgacatgtgccaagtttacgtgttctaagaagatgaccgggaagagcattcaaccggaaaatctggagtatcggataatgctatcagtgcatggctcccagcatagcgggatgattgtcaatgatacaggatatgaaactgacgaaaatagagcgaaagtcgaggttacgcctaattcaccaagagcggaagcaaccttgggaggctttggaagcttaggacttgactgtgaaccaaggacaggccttgacttttcagatctgtattacctgaccatgaacaataagcattggttggtgcacaaagagtggtttcatgacatcccattgccttggcatgctggggcagacaccggaactccacactggaacaacaaagaggcattggtagaattcaaggatgcccacgccaagaggcaaaccgtcgtcgttctggggagccaggaaggagccgttcacacggctctcgctggagctctagaggctgagatggatggtgcaaagggaaagctgttctctggccacttgaaatgccgcctaaaaatggacaagcttagattgaagggcgtgtcatattccttgtgcactgcggcattcacattcaccaaggtcccagctgaaacactgcatggaacagtcacagtggaggtgcagtatgcagggacagatggaccctgcaagatcccagtccagatggcggtggacatgcagaccctgaccccagttggaaggctgataaccgccaaccccgtgattactgaaagcactgagaactcaaagatgatgttggagcttgacccaccatttggggattcttacattgtcataggagttggggacaagaaaatcacccaccactggcataggagtggtagcaccatcggaaaggcatttgaggccactgtgagaggcgccaagagaatggcagtcctgggggatacagcctgggacttcggatcagtcgggggtgtgttcaactcactgggtaagggcattcaccagatttttggagcagccttcaaatcactgtttggaggaatgtcctggttctcacagatcctcataggcacgctgctagtgtggttaggtttgaacacaaagaatggatctatctccctcacatgcttggccctggggggagtgatgatcttcctctccacggctgtttctgctgatgtggggtgctcagtggacttctcaaaaaaggaaacgagatgtggcacgggggtattcatctataatgatgttgaagcctggagggaccggtacaagtaccatcctgactccccccgcagattggcagcagcagtcaagcaggcctgggaagaggggatctgtgggatctcatccgtttcaagaatggaaaacatcatgtggaaatcagtagaaggggagctcaatgctatcctagaggagaatggagttcaactgacagttgttgtgggatctgtaaaaaaccccatgtggagaggtccacaaagattgccagtgcctgtgaatgagctgccccatggctggaaagcctgggggaaatcgtattttgttagggcggcaaagaccaacaacagttttgttgtcgacggtgacacactgaaggaatgtccgcttgagcacagagcatggaatagttttcttgtggaggatcacgggtttggagtcttccacaccagtgtctggcttaaggtcagagaagattactcattagaatgtgacccagccgtcataggaacagctgttaagggaagggaggccgcgcacagtgatctgggctattggaaaaagagaaaagaagcaaggagagttcgggaaagcaaaaggtagccgcgccatctggtacatgtggttgggagccagattcttggagtttgaagcccttggattcttgaacgaggaccattggatgggaagagaaaactcaggaggtggagtcgaagggttaggattgcaaagacttggatacattctagaagaaatgaatcgggcaccaggaggaaagatgtacgcagatgacactgctggctgggacacccgcattagtaagtttgatctggagaatgaagctctgattaccaaccaaatggaggaagggcacagaactctggcgttggccgtgattaaatacacataccaaaacaaagtggtgaaggttctcagaccagctgaaggaggaaaaacagttatggacatcatttcaagacaagaccagagagggagtggacaagttgtcacttatgctctcaacacattcaccaacttggtggtgcagcttatccggaacatggaagctgaggaagtgttagagatgcaagacttatggttgttgaggaagccagagaaagtgaccagatggttgcagagcaatggatgggatagactcaaacgaatggcggtcagtggagatgactgcgttgtgaagccaatcgatgataggtttgcacatgccctcaggttcttgaatgacatgggaaaagttaggaaagacacacaggagtggaaaccctcgactggatggagcaattgggaagaagtcccgttctgctcccaccacttcaacaagctgtacctcaaggatgggagatccattgtggtcccttgccgccaccaagatgaactgattggccgagctcgcgtctcaccaggggcaggatggagcatccgggagactgcctgtcttgcaaaatcatatgcgcagatgtggcagctcctttatttccacagaagagaccttcgactgatggctaatgccatttgctcggctgtgccagttgactgggtaccaactgggagaaccacctggtcaatccatggaaagggagaatggatgaccactgaggacatgctcatggtgtggaatagagtgtggattgaggagaacgaccatatggaggacaagactcctgtaacaaaatggacagacattccctatctaggaaaaagggaggacttatggtgtggatcccttatagggcacagaccccgcaccacttgggctgaaaacatcaaagacacagtcaacatggtgcgcaggatcataggtgatgaagaaaagtacatggactatctatccacccaagtccgctacttgggtgaggaagggtccacacccggagtgttgtaagcaccaattttagtgttgtcaggcctgctagtcagccacagtttggggaaagctgtgcagcctgtaacccccccaggagaagctgggaaaccaagctcatagtcaggccgagaacgccatggcacggaagaagccatgctgcctgtgagcccctcagaggacactgagtcaaaaaaccccacgcgcttggaagcgcaggatgggaaaagaaggtggcgaccttccccacccttcaatctggggcctgaactggagactagctgtgaatctccagcagagggactagtggttagaggagaccccccggaaaacgcaaaacagcatattgacgctgggaaagaccagagactccatgagtttccaccacgctggccgccaggcacagatcgccgaacttcggcggccggtgtggggaaatccatggtttct

SEQ ID NO: 28 - DNA, 6513 bp, Artificial Sequence
  Synthetic sequence
agttgttgatctgtgtgagtcagactgcgacagttcgagtctgaagcgagagctaacaacagtatcaacaggtttaatttggatttggaaacgagagtttctggtcatgaaaaacccaaagaagaaatccggaggattccggattgtcaatatgctaaaacgcggagtagcccgtgtaaaccccttgggaggtttgaagaggttgccagccggacttctgctgggtcatggacccatcagaatggttttggcgatactagcctttttgagatttacagcaatcaagccatcactgggccttatcaacagatggggttccgtggggaaaaaagaggctatggaaataataaagaagtgaagaaaggagagaccacagatggagtgtacagagtgatgactcgcagactgctaggttcaacacaggttggagtgggagtcatgcaagagggagtcttccacaccatgtggcacgttacaaaaggagccgcactgaggagcggtgagggaagacttgatccatactggggggatgtcaagcaggacttggtgtcatactgtgggccttggaagttggatgcagcttgggatggactcagcgaggtacagcttttggccgtacctcccggagagagggccagaaacattcagaccctgcctggaatattcaagacaaaggacggggacatcggagcagttgctctggactaccctgcagggacctcaggatctccgatcctagacaaatgtggaagagtgataggactctatggcaatggggttgtgatcaagaatggaagctatgttagtgctataacccagggaaagagggaggaggagactccggttgaatgtttcgaaccctcgatgctgaagaagaagcagctaactgtcttggatctgcatccaggagccggaaaaaccaggagagttcttcctgaaatagtccgtgaagccataaaaaagagactccggacagtgatcttggcaccaactagggttgtcgctgctgagatggaggaggccttgagaggacttccggtgcgttacatgacaacagcagtcaacgtcacccattctgggacagaaatcgttgatttgatgtgccatgccactttcacttcacgcttactacaacccatcagagtccctaattacaatctctacatcatggatgaagcccacttcacagacccctcaagtatagctgcaagaggatacatatcaacaagggttgaaatgggcgaggcggctgccatttttatgactgccacaccaccaggaacccgtgatgcgtttcctgactctaactcaccaatcatggacacagaagtggaagtcccagagagagcctggagctcaggctttgattgggtgacagaccattctgggaaaacagtttggttcgttccaagcgtgagaaacggaaatgaaatcgcagcctgtctgacaaaggctggaaagcgggtcatacagctcagcaggaagacttttgagacagaatttcagaaaacaaaaaatcaagagtgggactttgtcataacaactgacatctcagagatgggcgccaacttcaaggctgaccgggtcatagactctaggagatgcctaaaaccagtcatacttgatggtgagagagtcatcttggctgggcccatgcctgtcacgcatgctagtgctgctcagaggagaggacgtataggcaggaaccctaacaaacctggagatgagtacatgtatggaggtgggtgtgcagagactgatgaaggccatgcacactggcttgaagcaagaatgcttcttgacaacatctacctccaggatggcctcatagcctcgctctatcggcctgaggccgataaggtagccgccattgagggagagtttaagctgaggacagagcaaaggaagaccttcgtggaactcatgaagagaggagaccttcccgtctggctagcctatcaggttgcatctgccggaataacttacacagacagaagatggtgctttgatggcacaaccaacaacaccataatggaagacagcgtaccagcagaggtgtggacaaagtatggagagaagagagtgctcaaaccgagatggatggatgctagggtctgttcagaccatgcggccctgaagtcgttcaaagaattcgccgctggaaaaagaggagcggctttgggagtaatggaggccctgggaacactgccaggacacatgacagagaggtttcaggaagccattgacaacctcgccgtgctcatgcgagcagagactggaagcaggccttataaggcagcggcagcccaactgccggagaccctagagaccattatgctcttaggtttgctgggaacagtttcactggggatcttcttcgtcttgatgcggaataagggcatcgggaagatgggctttggaatggtaacccttggggccagtgcatggctcatgtggctttcggaaattgaaccagccagaattgcatgtgtcctcattgttgtgtttttattactggtggtgctcatacccgagccagagaagcaaagatctccccaagataaccagatggcaattatcatcatggtggcagtgggccttctaggtttgataactgcaaacgaacttggatggctggaaagaacaaaaaatgacatagctcatctaatgggaaggagagaagaaggagcaaccatgggattctcaatggacattgatctgcggccagcctccgcctgggctatctatgccgcattgacaactctcatcaccccagctgtccaacatgcggtaaccacttcatacaacaactactccttaatggcgatggccacacaagctggagtgctgtttggcatgggcaaagggatgccattttatgcatgggaccttggagtcccgctgctaatgatgggttgctattcacaattaacacccctgactctgatagtagctatcattctgcttgtggcgcactacatgtacttgatcccaggcctacaagcggcagcagcgcgtgctgcccagaaaaggacagcagctggcatcatgaagaatcccgttgtggatggaatagtggtaactgacattgacacaatgacaatagacccccaggtggagaagaagatgggacaagtgttactcatagcagtagccatctccagtgctgtgctgctgcggaccgcctggggatggggggaggctggagctctgatcacagcagcgacctccaccttgtgggaaggctctccaaacaaatactggaactcctctacagccacctcactgtgcaacatcttcagaggaagctatctggcaggagcttcccttatctatacagtgacgagaaacgctggcctggttaagagacgtggaggtgggacgggagagactctgggagagaagtggaaagctcgtctgaatcagatgtcggccctggagttctactcttataaaaagtcaggtatcactgaagtgtgtagagaggaggctcgccgtgccctcaaggatggagtggccacaggaggacatgccgtatcccggggaagtgcaaagctcagatggttggtggagagaggatatctgcagccctatgggaaggttgttgacctcggatgtggcagagggggctggagctattatgccgccaccatccgcaaagtgcaggaggtgagaggatacacaaagggaggtcccggtcatgaagaacccatgctggtgcaaagctatgggtggaacatagttcgtctcaagagtggagtggacgtcttccacatggcggctgagccgtgtgacactctgctgtgtgacataggtgagtcatcatctagtcctgaagtggaagagacacgaacactcagagtgctctctatggtgggggactggcttgaaaaaagaccaggggccttctgtataaaggtgctgtgcccatacaccagcactatgatggaaaccatggagcgactgcaacgtaggcatgggggaggattagtcagagtgccattgtctcgcaactccacacatgagatgtactgggtctctggggcaaagagcaacatcataaaaagtgtgtccaccacaagtcagctcctcctgggacgcatggatggccccaggaggccagtgaaatatgaggaggatgtgaacctcggctcgggtacacgagctgtggcaagctgtgctgaggctcctaacatgaaaatcatcggcaggcgcattgagagaatccgcaatgaacatgcagaaacatggtttcttgatgaaaaccacccatacaggacatgggcctaccatgggagctacgaagcccccacgcaaggatcagcgtcttccctcgtgaacggggttgttagactcctgtcaaagccttgggacgtggtgactggagttacaggaatagccatgactgacaccacaccatacggccaacaaagagtcttcaaagaaaaagtggacaccagggtgccagatccccaagaaggcactcgccaggtaatgaacatagtctcttcctggctgtggaaggagctggggaaacgcaagcggccacgcgtctgcaccaaagaagagtttatcaacaaggtgcgcagcaatgcagcactgggagcaatatttgaagaggaaaaagaatggaagacggctgtggaagctgtgaatgatccaaggttttgggccctagtggatagggagagagaacaccacctgagaggagagtgtcacagctgtgtgtacaacatgatgggaaaaagagaaaagaagcaaggagagttcgggaaagcaaaaggtagccgcgccatctggtacatgtggttgggagccagattcttggagtttgaagcccttggattcttgaacgaggaccattggatgggaagagaaaactcaggaggtggagtcgaagggttaggattgcaaagacttggatacattctagaagaaatgaatcgggcaccaggaggaaagatgtacgcagatgacactgctggctgggacacccgcattagtaagtttgatctggagaatgaagctctgattaccaaccaaatggaggaagggcacagaactctggcgttggccgtgattaaatacacataccaaaacaaagtggtgaaggttctcagaccagctgaaggaggaaaaacagttatggacatcatttcaagacaagaccagagagggagtggacaagttgtcacttatgctctcaacacattcaccaacttggtggtgcagcttatccggaacatggaagctgaggaagtgttagagatgcaagacttatggttgttgaggaagccagagaaagtgaccagatggttgcagagcaatggatgggatagactcaaacgaatggcggtcagtggagatgactgcgttgtgaagccaatcgatgataggtttgcacatgccctcaggttcttgaatgacatgggaaaagttaggaaagacacacaggagtggaaaccctcgactggatggagcaattgggaagaagtcccgttctgctcccaccacttcaacaagctgtacctcaaggatgggagatccattgtggtcccttgccgccaccaagatgaactgattggccgagctcgcgtctcaccaggggcaggatggagcatccgggagactgcctgtcttgcaaaatcatatgcgcagatgtggcagctcctttatttccacagaagagaccttcgactgatggctaatgccatttgctcggctgtgccagttgactgggtaccaactgggagaaccacctggtcaatccatggaaagggagaatggatgaccactgaggacatgctcatggtgtggaatagagtgtggattgaggagaacgaccatatggaggacaagactcctgtaacaaaatggacagacattccctatctaggaaaaagggaggacttatggtgtggatcccttatagggcacagaccccgcaccacttgggctgaaaacatcaaagacacagtcaacatggtgcgcaggatcataggtgatgaagaaaagtacatggactatctatccacccaagtccgctacttgggtgaggaagggtccacacccggagtgttgtaagcaccaattttagtgttgtcaggcctgctagtcagccacagtttggggaaagctgtgcagcctgtaacccccccaggagaagctgggaaaccaagctcatagtcaggccgagaacgccatggcacggaagaagccatgctgcctgtgagcccctcagaggacactgagtcaaaaaaccccacgcgcttggaagcgcaggatgggaaaagaaggtggcgaccttccccacccttcaatctggggcctgaactggagactagctgtgaatctccagcagagggactagtggttagaggagaccccccggaaaacgcaaaacagcatattgacgctgggaaagaccagagactccatgagtttccaccacgctggccgccaggcacagatcgccgaacttcggcggccggtgtggggaaatccatggtttct

SEQ ID NO: 29 - DNA, 8136 bp, Artificial Sequence
  Synthetic sequence
agttgttgatctgtgtgagtcagactgcgacagttcgagtctgaagcgagagctaacaacagtatcaacaggtttaatttggatttggaaacgagagtttctggtcatgaaaaacccaaagaagaaatccggaggattccggattgtcaatatgctaaaacgcggagtagcccgtgtaaaccccttgggaggtttgaagaggttgccagccggacttctgctgggtcatggacccatcagaatggttttggcgatactagcctttttgagatttacagcaatcaagccatcactgggccttatcaacagatggggttccgtggggaaaaaagaggctatggaaataataaagaagttcaagaaagatcttgctgccatgttgagaataatcaatgctaggaaagagaggaagagacgtggcgcagacaccagcatcggaatcattggcctcctgctgactacagccatggcagcagagatcactagacgcgggagtgcatactacatgtacttggataggagcgatgccgggaaggccatttcgtttgctaccacattgggagtgaacaagtgccacgtaacaccagagagggttacagaacccaagtgaaagggccatggcacagtgaagagcttgaaatccggtttgaggaatgtccaggcaccaaggtttacgtggaggagacatgcggaactagaggaccatctctgagatcaactactgcaagtggaagggtcattgaggaatggtgctgtagggaatgcacaatgcccccactatcgtttcgagcaaaagacggctgctggtatggaatggagataaggcccaggaaagaaccagagagcaacttagtgaggtcaatggtgacagcggggtcaaccgatcatatggaccacttctctcttggagtgcttgtgattctactcatggtgcaggaggggttgaagaagagaatgaccacaaagatcatcatgagcacatcaatggcagtgctggtagtcatgatcttgggaggattttcaatgagtgacctggccaagcttgtgatcctgatgggtgctactttcgcagaaatgaacactggaggagatgtagctcacttggcattggtagcggcatttaaagtcagaccagccttgctggtctccttcattttcagagccaattggacaccccgtgagagcatgctgctagccctggcttcgtgtcttctgcaaactgcgatctctgctcttgaaggtgacttgatggtcctcattaatggatttgctttggcctggttggcaattcgagcaatggccgtgccacgcactgacaacatcgctctaccaatcttggctgctctaacaccactagctcgaggcacactgctcgtggcatggagagcgggcctggctacttgtggagggatcatgctcctctccctgaaagggaaaggtagtgtgaagaagaacctgccatttgtcatggccctgggattgacagctgtgagggtagtagaccctattaatgtggtaggactactgttactcacaaggagtgggaagcggagctggccccctagtgaagttctcacagccgttggcctgatatgtgcactggccggagggtttgccaaggcagacattgagatggctggacccatggctgcagtaggcttgctaattgtcagctatgtggtctcgggaaagagtgtggacatgtacattgaaagagcaggtgacatcacatgggaaaaggacgcggaagtcactggaaacagtcctcggcttgacgtggcactggatgagagtggtgatttctccttggtagaggaagatggtccacccatgagagagatcatactcaaggtggtcctgatggccatctgtggcatgaacccaatagctataccttttgctgcaggagcgtggtatgtgtatgtgaagactgggaaaaggagtggcgccctctgggacgtgcctgctcccaaagaagtgaagaaaggagagaccacagatggagtgtacagagtgatgactcgcagactgctaggttcaacacaggttggagtgggagtcatgcaagagggagtcttccacaccatgtggcacgttacaaaaggagccgcactgaggagcggtgagggaagacttgatccatactggggggatgtcaagcaggacttggtgtcatactgtgggccttggaagttggatgcagcttgggatggactcagcgaggtacagcttttggccgtacctcccggagagagggccagaaacattcagaccctgcctggaatattcaagacaaaggacggggacatcggagcagttgctctggactaccctgcagggacctcaggatctccgatcctagacaaatgtggaagagtgataggactctatggcaatggggttgtgatcaagaatggaagctatgttagtgctataacccagggaaagagggaggaggagactccggttgaatgtttcgaaccctcgatgctgaagaagaagcagctaactgtcttggatctgcatccaggagccggaaaaaccaggagagttcttcctgaaatagtccgtgaagccataaaaaagagactccggacagtgatcttggcaccaactagggttgtcgctgctgagatggaggaggccttgagaggacttccggtgcgttacatgacaacagcagtcaacgtcacccattctgggacagaaatcgttgatttgatgtgccatgccactttcacttcacgcttactacaacccatcagagtccctaattacaatctctacatcatggatgaagcccacttcacagacccctcaagtatagctgcaagaggatacatatcaacaagggttgaaatgggcgaggcggctgccatttttatgactgccacaccaccaggaacccgtgatgcgtttcctgactctaactcaccaatcatggacacagaagtggaagtcccagagagagcctggagctcaggctttgattgggtgacagaccattctgggaaaacagtttggttcgttccaagcgtgagaaacggaaatgaaatcgcagcctgtctgacaaaggctggaaagcgggtcatacagctcagcaggaagacttttgagacagaatttcagaaaacaaaaaatcaagagtgggactttgtcataacaactgacatctcagagatgggcgccaacttcaaggctgaccgggtcatagactctaggagatgcctaaaaccagtcatacttgatggtgagagagtcatcttggctgggcccatgcctgtcacgcatgctagtgctgctcagaggagaggacgtataggcaggaaccctaacaaacctggagatgagtacatgtatggaggtgggtgtgcagagactgatgaaggccatgcacactggcttgaagcaagaatgcttcttgacaacatctacctccaggatggcctcatagcctcgctctatcggcctgaggccgataaggtagccgccattgagggagagtttaagctgaggacagagcaaaggaagaccttcgtggaactcatgaagagaggagaccttcccgtctggctagcctatcaggttgcatctgccggaataacttacacagacagaagatggtgctttgatggcacaaccaacaacaccataatggaagacagcgtaccagcagaggtgtggacaaagtatggagagaagagagtgctcaaaccgagatggatggatgctagggtctgttcagaccatgcggccctgaagtcgttcaaagaattcgccgctggaaaaagaggagcggctttgggagtaatggaggccctgggaacactgccaggacacatgacagagaggtttcaggaagccattgacaacctcgccgtgctcatgcgagcagagactggaagcaggccttataaggcagcggcagcccaactgccggagaccctagagaccattatgctcttaggtttgctgggaacagtttcactggggatcttcttcgtcttgatgcggaataagggcatcgggaagatgggctttggaatggtaacccttggggccagtgcatggctcatgtggctttcggaaattgaaccagccagaattgcatgtgtcctcattgttgtgtttttattactggtggtgctcatacccgagccagagaagcaaagatctccccaagataaccagatggcaattatcatcatggtggcagtgggccttctaggtttgataactgcaaacgaacttggatggctggaaagaacaaaaaatgacatagctcatctaatgggaaggagagaagaaggagcaaccatgggattctcaatggacattgatctgcggccagcctccgcctgggctatctatgccgcattgacaactctcatcaccccagctgtccaacatgcggtaaccacttcatacaacaactactccttaatggcgatggccacacaagctggagtgctgtttggcatgggcaaagggatgccattttatgcatgggaccttggagtcccgctgctaatgatgggttgctattcacaattaacacccctgactctgatagtagctatcattctgcttgtggcgcactacatgtacttgatcccaggcctacaagcggcagcagcgcgtgctgcccagaaaaggacagcagctggcatcatgaagaatcccgttgtggatggaatagtggtaactgacattgacacaatgacaatagacccccaggtggagaagaagatgggacaagtgttactcatagcagtagccatctccagtgctgtgctgctgcggaccgcctggggatggggggaggctggagctctgatcacagcagcgacctccaccttgtgggaaggctctccaaacaaatactggaactcctctacagccacctcactgtgcaacatcttcagaggaagctatctggcaggagcttcccttatctatacagtgacgagaaacgctggcctggttaagagacgtggaggtgggacgggagagactctgggagagaagtggaaagctcgtctgaatcagatgtcggccctggagttctactcttataaaaagtcaggtatcactgaagtgtgtagagaggaggctcgccgtgccctcaaggatggagtggccacaggaggacatgccgtatcccggggaagtgcaaagctcagatggttggtggagagaggatatctgcagccctatgggaaggttgttgacctcggatgtggcagagggggctggagctattatgccgccaccatccgcaaagtgcaggaggtgagaggatacacaaagggaggtcccggtcatgaagaacccatgctggtgcaaagctatgggtggaacatagttcgtctcaagagtggagtggacgtcttccacatggcggctgagccgtgtgacactctgctgtgtgacataggtgagtcatcatctagtcctgaagtggaagagacacgaacactcagagtgctctctatggtgggggactggcttgaaaaaagaccaggggccttctgtataaaggtgctgtgcccatacaccagcactatgatggaaaccatggagcgactgcaacgtaggcatgggggaggattagtcagagtgccattgtctcgcaactccacacatgagatgtactgggtctctggggcaaagagcaacatcataaaaagtgtgtccaccacaagtcagctcctcctgggacgcatggatggccccaggaggccagtgaaatatgaggaggatgtgaacctcggctcgggtacacgagctgtggcaagctgtgctgaggctcctaacatgaaaatcatcggcaggcgcattgagagaatccgcaatgaacatgcagaaacatggtttcttgatgaaaaccacccatacaggacatgggcctaccatgggagctacgaagcccccacgcaaggatcagcgtcttccctcgtgaacggggttgttagactcctgtcaaagccttgggacgtggtgactggagttacaggaatagccatgactgacaccacaccatacggccaacaaagagtcttcaaagaaaaagtggacaccagggtgccagatccccaagaaggcactcgccaggtaatgaacatagtctcttcctggctgtggaaggagctggggaaacgcaagcggccacgcgtctgcaccaaagaagagtttatcaacaaggtgcgcagcaatgcagcactgggagcaatatttgaagaggaaaaagaatggaagacggctgtggaagctgtgaatgatccaaggttttgggccctagtggatagggagagagaacaccacctgagaggagagtgtcacagctgtgtgtacaacatgatgggaaaaagagaaaagaagcaaggagagttcgggaaagcaaaaggtagccgcgccatctggtacatgtggttgggagccagattcttggagtttgaagcccttggattcttgaacgaggaccattggatgggaagagaaaactcaggaggtggagtcgaagggttaggattgcaaagacttggatacattctagaagaaatgaatcgggcaccaggaggaaagatgtacgcagatgacactgctggctgggacacccgcattagtaagtttgatctggagaatgaagctctgattaccaaccaaatggaggaagggcacagaactctggcgttggccgtgattaaatacacataccaaaacaaagtggtgaaggttctcagaccagctgaaggaggaaaaacagttatggacatcatttcaagacaagaccagagagggagtggacaagttgtcacttatgctctcaacacattcaccaacttggtggtgcagcttatccggaacatggaagctgaggaagtgttagagatgcaagacttatggttgttgaggaagccagagaaagtgaccagatggttgcagagcaatggatgggatagactcaaacgaatggcggtcagtggagatgactgcgttgtgaagccaatcgatgataggtttgcacatgccctcaggttcttgaatgacatgggaaaagttaggaaagacacacaggagtggaaaccctcgactggatggagcaattgggaagaagtcccgttctgctcccaccacttcaacaagctgtacctcaaggatgggagatccattgtggtcccttgccgccaccaagatgaactgattggccgagctcgcgtctcaccaggggcaggatggagcatccgggagactgcctgtcttgcaaaatcatatgcgcagatgtggcagctcctttatttccacagaagagaccttcgactgatggctaatgccatttgctcggctgtgccagttgactgggtaccaactgggagaaccacctggtcaatccatggaaagggagaatggatgaccactgaggacatgctcatggtgtggaatagagtgtggattgaggagaacgaccatatggaggacaagactcctgtaacaaaatggacagacattccctatctaggaaaaagggaggacttatggtgtggatcccttatagggcacagaccccgcaccacttgggctgaaaacatcaaagacacagtcaacatggtgcgcaggatcataggtgatgaagaaaagtacatggactatctatccacccaagtccgctacttgggtgaggaagggtccacacccggagtgttgtaagcaccaattttagtgttgtcaggcctgctagtcagccacagtttggggaaagctgtgcagcctgtaacccccccaggagaagctgggaaaccaagctcatagtcaggccgagaacgccatggcacggaagaagccatgctgcctgtgagcccctcagaggacactgagtcaaaaaaccccacgcgcttggaagcgcaggatgggaaaagaaggtggcgaccttccccacccttcaatctggggcctgaactggagactagctgtgaatctccagcagagggactagtggttagaggagaccccccggaaaacgcaaaacagcatattgacgctgggaaagaccagagactccatgagtttccaccacgctggccgccaggcacagatcgccgaacttcggcggccggtgtggggaaatccatggtttct

SEQ ID NO: 30 - DNA, 10224 bp, Artificial Sequence
  Synthetic sequence
agttgttgatctgtgtgagtcagactgcgacagttcgagtctgaagcgagagctaacaacagtatcaacaggtttaatttggatttggaaacgagagtttctggtcatgaaaaacccaaagaagaaatccggaggattccggattgtcaatatgctaaaacgcggagtagcccgtgtaaaccccttgggaggtttgaagaggttgccagccggacttctgctgggtcatggacccatcagaatggttttggcgatactagcctttttgagatttacagcaatcaagccatcactgggccttatcaacagatggggttccgtggggaaaaaagaggctatggaaataataaagaagttcaagaaagatcttgctgccatgttgagaataatcaatgctaggaaagagaggaagagacgtggcgcagacaccagcatcggaatcattggcctcctgctgactacagccatggcagcagagatcactagacgcgggagtgcatactacatgtacttggataggagcgatgccgggaaggccatttcgtttgctaccacattgggagtgaacaagtgccacgtacagatcatggacctcgggcacatgtgtgacgccaccatgagttatgagtgccctatgctggatgagggagtggaaccagatgatgtcgattgctggtgcaacacgacatcaacttgggttgtgtacggaacctgtcatcacaaaaaaggtgaggcacggcgatctagaagagccgtgacgctcccttctcactctacaaggaagttgcaaacgcggtcgcagacctggttagaatcaagagaatacacgaagcacttgatcaaggttgaaaactggatattcaggaaccccgggtttgcgctagtggccgttgccattgcctggcttttgggaagctcgacgagccaaaaagtcatatacttggtcatgatactgctgattgccccggcatacagtatcaggtgcattggagtcagcaatagagacttcgtggagggcatgtcaggtgggacctgggttgatgttgtcttggaacatggaggctgcgttaccgtgatggcacaggacaagccaacagttgacatagagttggtcacgacgacggttagtaacatggccgaggtaagatcctattgctacgaggcatcgatatcggacatggcttcggacagtcgttgcccaacacaaggtgaggcctaccttgacaagcaatcagacactcaatatgtctgcaaaagaacattagtggacagaggttggggaaacggttgtggactttttggcaaagggagcttggtgacatgtgccaagtttacgtgttctaagaagatgaccgggaagagcattcaaccggaaaatctggagtatcggataatgctatcagtgcatggctcccagcatagcgggatgattgtcaatgatacaggatatgaaactgacgaaaatagagcgaaagtcgaggttacgcctaattcaccaagagcggaagcaaccttgggaggctttggaagcttaggacttgactgtgaaccaaggacaggccttgacttttcagatctgtattacctgaccatgaacaataagcattggttggtgcacaaagagtggtttcatgacatcccattgccttggcatgctggggcagacaccggaactccacactggaacaacaaagaggcattggtagaattcaaggatgcccacgccaagaggcaaaccgtcgtcgttctggggagccaggaaggagccgttcacacggctctcgctggagctctagaggctgagatggatggtgcaaagggaaagctgttctctggccacttgaaatgccgcctaaaaatggacaagcttagattgaagggcgtgtcatattccttgtgcactgcggcattcacattcaccaaggtcccagctgaaacactgcatggaacagtcacagtggaggtgcagtatgcagggacagatggaccctgcaagatcccagtccagatggcggtggacatgcagaccctgaccccagttggaaggctgataaccgccaaccccgtgattactgaaagcactgagaactcaaagatgatgttggagcttgacccaccatttggggattcttacattgtcataggagttggggacaagaaaatcacccaccactggcataggagtggtagcaccatcggaaaggcatttgaggccactgtgagaggcgccaagagaatggcagtcctgggggatacagcctgggacttcggatcagtcgggggtgtgttcaactcactgggtaagggcattcaccagatttttggagcagccttcaaatcactgtttggaggaatgtcctggttctcacagatcctcataggcacgctgctagtgtggttaggtttgaacacaaagaatggatctatctccctcacatgcttggccctggggggagtgatgatcttcctctccacggctgtttctgctgatgtggggtgctcagtggacttctcaaaaaaggaaacgagatgtggcacgggggtattcatctataatgatgttgaagcctggagggaccggtacaagtaccatcctgactccccccgcagattggcagcagcagtcaagcaggcctgggaagaggggatctgtgggatctcatccgtttcaagaatggaaaacatcatgtggaaatcagtagaaggggagctcaatgctatcctagaggagaatggagttcaactgacagttgttgtgggatctgtaaaaaaccccatgtggagaggtccacaaagattgccagtgcctgtgaatgagctgccccatggctggaaagcctgggggaaatcgtattttgttagggcggcaaagaccaacaacagttttgttgtcgacggtgacacactgaaggaatgtccgcttgagcacagagcatggaatagttttcttgtggaggatcacgggtttggagtcttccacaccagtgtctggcttaaggtcagagaagattactcattagaatgtgacccagccgtcataggaacagctgttaagggaagggaggccgcgcacagtgatctgggctattggattgaaagtgaaaagaatgacacatggaggctgaagagggcccacctgattgagatgaaaacatgtgaatggccaaagtctcacacattgtggacagatggagtagaagaaagtgatcttatcatacccaagtctttagctggtccactcagccaccacaacaccagagagggttacagaacccaagtgaaagggccatggcacagtgaagagcttgaaatccggtttgaggaatgtccaggcaccaaggtttacgtggaggagacatgcggaactagaggaccatctctgagatcaactactgcaagtggaagggtcattgaggaatggtgctgtagggaatgcacaatgcccccactatcgtttcgagcaaaagacggctgctggtatggaatggagataaggcccaggaaagaaccagagagcaacttagtgaggtcaatggtgacagcggggtcaaccgatcatatggaccacttctctcttggagtgcttgtgattctactcatggtgcaggaggggttgaagaagagaatgaccacaaagatcatcatgagcacatcaatggcagtgctggtagtcatgatcttgggaggattttcaatgagtgacctggccaagcttgtgatcctgatgggtgctactttcgcagaaatgaacactggaggagatgtagctcacttggcattggtagcggcatttaaagtcagaccagccttgctggtctccttcattttcagagccaattggacaccccgtgagagcatgctgctagccctggcttcgtgtcttctgcaaactgcgatctctgctcttgaaggtgacttgatggtcctcattaatggatttgctttggcctggttggcaattcgagcaatggccgtgccacgcactgacaacatcgctctaccaatcttggctgctctaacaccactagctcgaggcacactgctcgtggcatggagagcgggcctggctacttgtggagggatcatgctcctctccctgaaagggaaaggtagtgtgaagaagaacctgccatttgtcatggccctgggattgacagctgtgagggtagtagaccctattaatgtggtaggactactgttactcacaaggagtgggaagcggagctggccccctagtgaagttctcacagccgttggcctgatatgtgcactggccggagggtttgccaaggcagacattgagatggctggacccatggctgcagtaggcttgctaattgtcagctatgtggtctcgggaaagagtgtggacatgtacattgaaagagcaggtgacatcacatgggaaaaggacgcggaagtcactggaaacagtcctcggcttgacgtggcactggatgagagtggtgatttctccttggtagaggaagatggtccacccatgagagagatcatactcaaggtggtcctgatggccatctgtggcatgaacccaatagctataccttttgctgcaggagcgtggtatgtgtatgtgaagactgggaaaaggagtggcgccctctgggacgtgcctgctcccaaagaagtgaagaaaggagagaccacagatggagtgtacagagtgatgactcgcagactgctaggttcaacacaggttggagtgggagtcatgcaagagggagtcttccacaccatgtggcacgttacaaaaggagccgcactgaggagcggtgagggaagacttgatccatactggggggatgtcaagcaggacttggtgtcatactgtgggccttggaagttggatgcagcttgggatggactcagcgaggtacagcttttggccgtacctcccggagagagggccagaaacattcagaccctgcctggaatattcaagacaaaggacggggacatcggagcagttgctctggactaccctgcagggacctcaggatctccgatcctagacaaatgtggaagagtgataggactctatggcaatggggttgtgatcaagaatggaagctatgttagtgctataacccagggaaagagggaggaggagactccggttgaatgtttcgaaccctcgatgctgaagaagaagcagctaactgtcttggatctgcatccaggagccggaaaaaccaggagagttcttcctgaaatagtccgtgaagccataaaaaagagactccggacagtgatcttggcaccaactagggttgtcgctgctgagatggaggaggccttgagaggacttccggtgcgttacatgacaacagcagtcaacgtcacccattctgggacagaaatcgttgatttgatgtgccatgccactttcacttcacgcttactacaacccatcagagtccctaattacaatctctacatcatggatgaagcccacttcacagacccctcaagtatagctgcaagaggatacatatcaacaagggttgaaatgggcgaggcggctgccatttttatgactgccacaccaccaggaacccgtgatgcgtttcctgactctaactcaccaatcatggacacagaagtggaagtcccagagagagcctggagctcaggctttgattgggtgacagaccattctgggaaaacagtttggttcgttccaagcgtgagaaacggaaatgaaatcgcagcctgtctgacaaaggctggaaagcgggtcatacagctcagcaggaagacttttgagacagaatttcagaaaacaaaaaatcaagagtgggactttgtcataacaactgacatctcagagatgggcgccaacttcaaggctgaccgggtcatagactctaggagatgcctaaaaccagtcatacttgatggtgagagagtcatcttggctgggcccatgcctgtcacgcatgctagtgctgctcagaggagaggacgtataggcaggaaccctaacaaacctggagatgagtacatgtatggaggtgggtgtgcagagactgatgaaggccatgcacactggcttgaagcaagaatgcttcttgacaacatctacctccaggatggcctcatagcctcgctctatcggcctgaggccgataaggtagccgccattgagggagagtttaagctgaggacagagcaaaggaagaccttcgtggaactcatgaagagaggagaccttcccgtctggctagcctatcaggttgcatctgccggaataacttacacagacagaagatggtgctttgatggcacaaccaacaacaccataatggaagacagcgtaccagcagaggtgtggacaaagtatggagagaagagagtgctcaaaccgagatggatggatgctagggtctgttcagaccatgcggccctgaagtcgttcaaagaattcgccgctggaaaaagaggagcggctttgggagtaatggaggccctgggaacactgccaggacacatgacagagaggtttcaggaagccattgacaacctcgccgtgctcatgcgagcagagactggaagcaggccttataaggcagcggcagcccaactgccggagaccctagagaccattatgctcttaggtttgctgggaacagtttcactggggatcttcttcgtcttgatgcggaataagggcatcgggaagatgggctttggaatggtaacccttggggccagtgcatggctcatgtggctttcggaaattgaaccagccagaattgcatgtgtcctcattgttgtgtttttattactggtggtgctcatacccgagccagagaagcaaagatctccccaagataaccagatggcaattatcatcatggtggcagtgggccttctaggtttgataactgcaaacgaacttggatggctggaaagaacaaaaaatgacatagctcatctaatgggaaggagagaagaaggagcaaccatgggattctcaatggacattgatctgcggccagcctccgcctgggctatctatgccgcattgacaactctcatcaccccagctgtccaacatgcggtaaccacttcatacaacaactactccttaatggcgatggccacacaagctggagtgctgtttggcatgggcaaagggatgccattttatgcatgggaccttggagtcccgctgctaatgatgggttgctattcacaattaacacccctgactctgatagtagctatcattctgcttgtggcgcactacatgtacttgatcccaggcctacaagcggcagcagcgcgtgctgcccagaaaaggacagcagctggcatcatgaagaatcccgttgtggatggaatagtggtaactgacattgacacaatgacaatagacccccaggtggagaagaagatgggacaagtgttactcatagcagtagccatctccagtgctgtgctgctgcggaccgcctggggatggggggaggctggagctctgatcacagcagcgacctccaccttgtgggaaggctctccaaacaaatactggaactcctctacagccacctcactgtgcaacatcttcagaggaagctatctggcaggagcttcccttatctatacagtgacgagaaacgctggcctggttaagagacgtggaggtgggacgggagagactctgggagagaagtggaaagctcgtctgaatcagatgtcggccctggagttctactcttataaaaagtcaggtatcactgaagtgtgtagagaggaggctcgccgtgccctcaaggatggagtggccacaggaggacatgccgtatcccggggaagtgcaaagctcagatggttggtggagagaggatatctgcagccctatgggaaggttgttgacctcggatgtggcagagggggctggagctattatgccgccaccatccgcaaagtgcaggaggtgagaggatacacaaagggaggtcccggtcatgaagaacccatgctggtgcaaagctatgggtggaacatagttcgtctcaagagtggagtggacgtcttccacatggcggctgagccgtgtgacactctgctgtgtgacataggtgagtcatcatctagtcctgaagtggaagagacacgaacactcagagtgctctctatggtgggggactggcttgaaaaaagaccaggggccttctgtataaaggtgctgtgcccatacaccagcactatgatggaaaccatggagcgactgcaacgtaggcatgggggaggattagtcagagtgccattgtctcgcaactccacacatgagatgtactgggtctctggggcaaagagcaacatcataaaaagtgtgtccaccacaagtcagctcctcctgggacgcatggatggccccaggaggccagtgaaatatgaggaggatgtgtgtacaacatgatgggaaaaagagaaaagaagcaaggagagttcgggaaagcaaaaggtagccgcgccatctggtacatgtggttgggagccagattcttggagtttgaagcccttggattcttgaacgaggaccattggatgggaagagaaaactcaggaggtggagtcgaagggttaggattgcaaagacttggatacattctagaagaaatgaatcgggcaccaggaggaaagatgtacgcagatgacactgctggctgggacacccgcattagtaagtttgatctggagaatgaagctctgattaccaaccaaatggaggaagggcacagaactctggcgttggccgtgattaaatacacataccaaaacaaagtggtgaaggttctcagaccagctgaaggaggaaaaacagttatggacatcatttcaagacaagaccagagagggagtggacaagttgtcacttatgctctcaacacattcaccaacttggtggtgcagcttatccggaacatggaagctgaggaagtgttagagatgcaagacttatggttgttgaggaagccagagaaagtgaccagatggttgcagagcaatggatgggatagactcaaacgaatggcggtcagtggagatgactgcgttgtgaagccaatcgatgataggtttgcacatgccctcaggttcttgaatgacatgggaaaagttaggaaagacacacaggagtggaaaccctcgactggatggagcaattgggaagaagtcccgttctgctcccaccacttcaacaagctgtacctcaaggatgggagatccattgtggtcccttgccgccaccaagatgaactgattggccgagctcgcgtctcaccaggggcaggatggagcatccgggagactgcctgtcttgcaaaatcatatgcgcagatgtggcagctcctttatttccacagaagagaccttcgactgatggctaatgccatttgctcggctgtgccagttgactgggtaccaactgggagaaccacctggtcaatccatggaaagggagaatggatgaccactgaggacatgctcatggtgtggaatagagtgtggattgaggagaacgaccatatggaggacaagactcctgtaacaaaatggacagacattccctatctaggaaaaagggaggacttatggtgtggatcccttatagggcacagaccccgcaccacttgggctgaaaacatcaaagacacagtcaacatggtgcgcaggatcataggtgatgaagaaaagtacatggactatctatccacccaagtccgctacttgggtgaggaagggtccacacccggagtgttgtaagcaccaattttagtgttgtcaggcctgctagtcagccacagtttggggaaagctgtgcagcctgtaacccccccaggagaagctgggaaaccaagctcatagtcaggccgagaacgccatggcacggaagaagccatgctgcctgtgagcccctcagaggacactgagtcaaaaaaccccacgcgcttggaagcgcaggatgggaaaagaaggtggcgaccttccccacccttcaatctggggcctgaactggagactagctgtgaatctccagcagagggactagtggttagaggagaccccccggaaaacgcaaaacagcatattgacgctgggaaagaccagagactccatgagtttccaccacgctggccgccaggcacagatcgccgaacttcggcggccggtgtggggaaatccatggtttct

SEQ ID NO: 31 - DNA, 10272 bp, Artificial Sequence
  Synthetic sequence
agttgttgatctgtgtgagtcagactgcgacagttcgagtctgaagcgagagctaacaacagtatcaacaggtttaatttggatttggaaacgagagtttctggtcatgaaaaacccaaagaagaaatccggaggattccggattgtcaatatgctaaaacgcggagtagcccgtgtaaaccccttgggaggtttgaagaggttgccagccggacttctgctgggtcatggacccatcagaatggttttggcgatactagcctttttgagatttacagcaatcaagccatcactgggccttatcaacagatggggttccgtggggaaaaaagaggctatggaaataataaagaagttcaagaaagatcttgctgccatgttgagaataatcaatgctaggaaagagaggaagagacgtggcgcagacaccagcatcggaatcattggcctcctgctgactacagccatggcagcagagatcactagacgcgggagtgcatactacatgtacttggataggagcgatgccgggaaggccatttcgtttgctaccacattgggagtgaacaagtgccacgtacagatcatggacctcgggcacatgtgtgacgccaccatgagttatgagtgccctatgctggatgagggagtggaaccagatgatgtcgattgctggtgcaacacgacatcaacttgggttgtgtacggaacctgtcatcacaaaaaaggtgaggcacggcgatctagaagagccgtgacgctcccttctcactctacaaggaagttgcaaacgcggtcgcagacctggttagaatcaagagaatacacgaagcacttgatcaaggttgaaaactggatattcaggaaccccgggtttgcgctagtggccgttgccattgcctggcttttgggaagctcgacgagccaaaaagtcatatacttggtcatgatactgctgattgccccggcatacagtatcaggtgcattggagtcagcaatagagacttcgtggagggcatgtcaggtgggacctgggttgatgttgtcttggaacatggaggctgcgttaccgtgatggcacaggacaagccaacagttgacatagagttggtcacgacgacggttagtaacatggccgaggtaagatcctattgctacgaggcatcgatatcggacatggcttcggacagtcgttgcccaacacaaggtgaggcctaccttgacaagcaatcagacactcaatatgtctgcaaaagaacattagtggacagaggttggggaaacggttgtggactttttggcaaagggagcttggtgacatgtgccaagtttacgtgttctaagaagatgaccgggaagagcattcaaccggaaaatctggagtatcggataatgctatcagtgcatggctcccagcatagcgggatgattgtcaatgatacaggatatgaaactgacgaaaatagagcgaaagtcgaggttacgcctaattcaccaagagcggaagcaaccttgggaggctttggaagcttaggacttgactgtgaaccaaggacaggccttgacttttcagatctgtattacctgaccatgaacaataagcattggttggtgcacaaagagtggtttcatgacatcccattgccttggcatgctggggcagacaccggaactccacactggaacaacaaagaggcattggtagaattcaaggatgcccacgccaagaggcaaaccgtcgtcgttctggggagccaggaaggagccgttcacacggctctcgctggagctctagaggctgagatggatggtgcaaagggaaagctgttctctggccacttgaaatgccgcctaaaaatggacaagcttagattgaagggcgtgtcatattccttgtgcactgcggcattcacattcaccaaggtcccagctgaaacactgcatggaacagtcacagtggaggtgcagtatgcagggacagatggaccctgcaagatcccagtccagatggcggtggacatgcagaccctgaccccagttggaaggctgataaccgccaaccccgtgattactgaaagcactgagaactcaaagatgatgttggagcttgacccaccatttggggattcttacattgtcataggagttggggacaagaaaatcacccaccactggcataggagtggtagcaccatcggaaaggcatttgaggccactgtgagaggcgccaagagaatggcagtcctgggggatacagcctgggacttcggatcagtcgggggtgtgttcaactcactgggtaagggcattcaccagatttttggagcagccttcaaatcactgtttggaggaatgtcctggttctcacagatcctcataggcacgctgctagtgtggttaggtttgaacacaaagaatggatctatctccctcacatgcttggccctggggggagtgatgatcttcctctccacggctgtttctgctgatgtggggtgctcagtggacttctcaaaaaaggaaacgagatgtggcacgggggtattcatctataatgatgttgaagcctggagggaccggtacaagtaccatcctgactccccccgcagattggcagcagcagtcaagcaggcctgggaagaggggatctgtgggatctcatccgtttcaagaatggaaaacatcatgtggaaatcagtagaaggggagctcaatgctatcctagaggagaatggagttcaactgacagttgttgtgggatctgtaaaaaaccccatgtggagaggtccacaaagattgccagtgcctgtgaatgagctgccccatggctggaaagcctgggggaaatcgtattttgttagggcggcaaagaccaacaacagttttgttgtcgacggtgacacactgaaggaatgtccgcttgagcacagagcatggaatagttttcttgtggaggatcacgggtttggagtcttccacaccagtgtctggcttaaggtcagagaagattactcattagaatgtgacccagccgtcataggaacagctgttaagggaagggaggccgcgcacagtgatctgggctattggattgaaagtgaaaagaatgacacatggaggctgaagagggcccacctgattgagatgaaaacatgtgaatggccaaagtctcacacattgtggacagatggagtagaagaaagtgatcttatcatacccaagtctttagctggtccactcagccaccacaacaccagagagggttacagaacccaagtgaaagggccatggcacagtgaagagcttgaaatccggtttgaggaatgtccaggcaccaaggtttacgtggaggagacatgcggaactagaggaccatctctgagatcaactactgcaagtggaagggtcattgaggaatggtgctgtagggaatgcacaatgcccccactatcgtttcgagcaaaagacggctgctggtatggaatggagataaggcccaggaaagaaccagagagcaacttagtgaggtcaatggtgacagcggggtcaaccgatcatatggaccacttctctcttggagtgcttgtgattctactcatggtgcaggaggggttgaagaagagaatgaccacaaagatcatcatgagcacatcaatggcagtgctggtagtcatgatcttgggaggattttcaatgagtgacctggccaagcttgtgatcctgatgggtgctactttcgcagaaatgaacactggaggagatgtagctcacttggcattggtagcggcatttaaagtcagaccagccttgctggtctccttcattttcagagccaattggacaccccgtgagagcatgctgctagccctggcttcgtgtcttctgcaaactgcgatctctgctcttgaaggtgacttgatggtcctcattaatggatttgctttggcctggttggcaattcgagcaatggccgtgccacgcactgacaacatcgctctaccaatcttggctgctctaacaccactagctcgaggcacactgctcgtggcatggagagcgggcctggctacttgtggagggatcatgctcctctccctgaaagggaaaggtagtgtgaagaagaacctgccatttgtcatggccctgggattgacagctgtgagggtagtagaccctattaatgtggtaggactactgttactcacaaggagtgggaagcggagctggccccctagtgaagttctcacagccgttggcctgatatgtgcactggccggagggtttgccaaggcagacattgagatggctggacccatggctgcagtaggcttgctaattgtcagctatgtggtctcgggaaagagtgtggacatgtacattgaaagagcaggtgacatcacatgggaaaaggacgcggaagtcactggaaacagtcctcggcttgacgtggcactggatgagagtggtgatttctccttggtagaggaagatggtccacccatgagagagatcatactcaaggtggtcctgatggccatctgtggcatgaacccaatagctataccttttgctgcaggagcgtggtatgtgtatgtgaagactgggaaaaggagtggcgccctctgggacgtgcctgctcccaaagaagtgaagaaaggagagaccacagatggagtgtacagagtgatgactcgcagactgctaggttcaacacaggttggagtgggagtcatgcaagagggagtcttccacaccatgtggcacgttacaaaaggagccgcactgaggagcggtgagggaagacttgatccatactggggggatgtcaagcaggacttggtgtcatactgtgggccttggaagttggatgcagcttgggatggactcagcgaggtacagcttttggccgtacctcccggagagagggccagaaacattcagaccctgcctggaatattcaagacaaaggacggggacatcggagcagttgctctggactaccctgcagggacctcaggatctccgatcctagacaaatgtggaagagtgataggactctatggcaatggggttgtgatcaagaatggaagctatgttagtgctataacccagggaaagagggaggaggagactccggttgaatgtttcgaaccctcgatgctgaagaagaagcagctaactgtcttggatctgcatccaggagccggaaaaaccaggagagttcttcctgaaatagtccgtgaagccataaaaaagagactccggacagtgatcttggcaccaactagggttgtcgctgctgagatggaggaggccttgagaggacttccggtgcgttacatgacaacagcagtcaacgtcacccattctgggacagaaatcgttgatttgatgtgccatgccactttcacttcacgcttactacaacccatcagagtccctaattacaatctctacatcatggatgaagcccacttcacagacccctcaagtatagctgcaagaggatacatatcaacaagggttgaaatgggcgaggcggctgccatttttatgactgccacaccaccaggaacccgtgatgcgtttcctgactctaactcaccaatcatggacacagaagtggaagtcccagagagagcctggagctcaggctttgattgggtgacagaccattctgggaaaacagtttggttcgttccaagcgtgagaaacggaaatgaaatcgcagcctgtctgacaaaggctggaaagcgggtcatacagctcagcaggaagacttttgagacagaatttcagaaaacaaaaaatcaagagtgggactttgtcataacaactgacatctcaaaccgagatggatggatgctagggtctgttcagaccatgcggccctgaagtcgttcaaagaattcgccgctggaaaaagaggagcggctttgggagtaatggaggccctgggaacactgccaggacacatgacagagaggtttcaggaagccattgacaacctcgccgtgctcatgcgagcagagactggaagcaggccttataaggcagcggcagcccaactgccggagaccctagagaccattatgctcttaggtttgctgggaacagtttcactggggatcttcttcgtcttgatgcggaataagggcatcgggaagatgggctttggaatggtaacccttggggccagtgcatggctcatgtggctttcggaaattgaaccagccagaattgcatgtgtcctcattgttgtgtttttattactggtggtgctcatacccgagccagagaagcaaagatctccccaagataaccagatggcaattatcatcatggtggcagtgggccttctaggtttgataactgcaaacgaacttggatggctggaaagaacaaaaaatgacatagctcatctaatgggaaggagagaagaaggagcaaccatgggattctcaatggacattgatctgcggccagcctccgcctgggctatctatgccgcattgacaactctcatcaccccagctgtccaacatgcggtaaccacttcatacaacaactactccttaatggcgatggccacacaagctggagtgctgtttggcatgggcaaagggatgccattttatgcatgggaccttggagtcccgctgctaatgatgggttgctattcacaattaacacccctgactctgatagtagctatcattctgcttgtggcgcactacatgtacttgatcccaggcctacaagcggcagcagcgcgtgctgcccagaaaaggacagcagctggcatcatgaagaatcccgttgtggatggaatagtggtaactgacattgacacaatgacaatagacccccaggtggagaagaagatgggacaagtgttactcatagcagtagccatctccagtgctgtgctgctgcggaccgcctggggatggggggaggctggagctctgatcacagcagcgacctccaccttgtgggaaggctctccaaacaaatactggaactcctctacagccacctcactgtgcaacatcttcagaggaagctatctggcaggagcttcccttatctatacagtgacgagaaacgctggcctggttaagagacgtggaggtgggacgggagagactctgggagagaagtggaaagctcgtctgaatcagatgtcggccctggagttctactcttataaaaagtcaggtatcactgaagtgtgtagagaggaggctcgccgtgccctcaaggatggagtggccacaggaggacatgccgtatcccggggaagtgcaaagctcagatggttggtggagagaggatatctgcagccctatgggaaggttgttgacctcggatgtggcagagggggctggagctattatgccgccaccatccgcaaagtgcaggaggtgagaggatacacaaagggaggtcccggtcatgaagaacccatgctggtgcaaagctatgggtggaacatagttcgtctcaagagtggagtggacgtcttccacatggcggctgagccgtgtgacactctgctgtgtgacataggtgagtcatcatctagtcctgaagtggaagagacacgaacactcagagtgctctctatggtgggggactggcttgaaaaaagaccaggggccttctgtataaaggtgctgtgcccatacaccagcactatgatggaaaccatggagcgactgcaacgtaggcatgggggaggattagtcagagtgccattgtctcgcaactccacacatgagatgtactgggtctctggggcaaagagcaacatcataaaaagtgtgtccaccacaagtcagctcctcctgggacgcatggatggccccaggaggccagtgaaatatgaggaggatgtgaacctcggctcgggtacacgagctgtggcaagctgtgctgaggctcctaacatgaaaatcatcggcaggcgcattgagagaatccgcaatgaacatgcagaaacatggtttcttgatgaaaaccacccatacaggacatgggcctaccatgggagctacgaagcccccacgcaaggatcagcgtcttccctcgtgaacggggttgttagactcctgtcaaagccttgggacgtggtgactggagttacaggaatagccatgactgacaccacaccatacggccaacaaagagtcttcaaagaaaaagtggacaccagggtgccagatccccaagaaggcactcgccaggtaatgaacatagtctcttcctggctgtggaaggagctggggaaacgcaagcggccacgcgtctgcaccaaagaagagtttatcaacaaggtgcgcagcaatgcagcactgggagcaatatttgaagaggaaaaagaatggaagacggctgtggaagctgtgaatgatccaaggttttgggccctagtggatagggagagagaacaccacctgagaggagagtgtcacagctgtgtgtacaacatgatgggaaaaagagaaaagaagcaaggagagttcgggaaagcaaaaggtagccgcgccatctggtacatgtggttgggagccagattcttggagtttgaagcccttggattcttgaacgaggaccattggatgggaagagaaaactcaggaggtggagtcgaagggttaggattgcaaagacttggatacattctagaagaaatgaatcgggcaccaggaggaaagatgtacgcagatgacactgctggctgggacacccgcattagtaagtttgatctggagaatgaagctctgattaccaaccaaatggaggaagggcacagaactctggcgttggccgtgattaaatacacataccaaaacaaagtggtgaaggttctcagaccagctgaaggaggaaaaacagttatggacatcatttcaagacaagaccagagagggagtggacaagttgtcacttatgctctcaacacattcaccaacttggtggtgcagcttatccggaacatggaagctgaggaagtgttagagatgcaagacttatggttgttgaggaagccagagaaagtgaccagatggttgcagagcaatggatgggatagactcaaacgaatggcggtcagtggagatgactgcgttgtgaagccaatcgatgataggtttgcacatgccctcaggttcttgaatgacatgggaaaagttaggaaagacacacaggagtggaaaccctcgactggatggagcaattgggaagaagtcccgttctgctcccaccacttcaacaagctgtacctcaaggatgggagatccattgtggtcccttgccgccaccaagatgaactgattggccgagctcgcgtctcaccaggggcaggatggagcatccgggagactgcctgtcttgcaaaatcatatgcgcagatgtggcagctcctttatttccacagaagagaccttcgactgatggctaatgccatttgctcggctgtgccagttgactgggtaccaactgggagaaccacctggtcaatccatggaaagggagaatggatgaccactgaggacatgctcatggtgtggaatagagtgtggattgaggagaacgaccatatggaggacaagactcctgtaacaaaatggacagacattccctatctaggaaaaagggaggacttatggtgtggatcccttatagggcacagaccccgcaccacttgggctgaaaacatcaaagacacagtcaacatggtgcgcaggatcataggtgatgaagaaaagtacatggactatctatccacccaagtccgctacttgggtgaggaagggtccacacccggagtgttgtaagcaccaattttagtgttgtcaggcctgctagtcagccacagtttggggaaagctgtgcagcctgtaacccccccaggagaagctgggaaaccaagctcatagtcaggccgagaacgccatggcacggaagaagccatgctgcctgtgagcccctcagaggacactgagtcaaaaaaccccacgcgcttggaagcgcaggatgggaaaagaaggtggcgaccttccccacccttcaatctggggcctgaactggagactagctgtgaatctccagcagagggactagtggttagaggagaccccccggaaaacgcaaaacagcatattgacgctgggaaagaccagagactccatgagtttccaccacgctggccgccaggcacagatcgccgaacttcggcggccggtgtggggaaatccatggtttct

SEQ ID NO: 32 - DNA, 8137 bp, Artificial Sequence
  Synthetic sequence
agttgttgatctgtgtgagtcagactgcgacagttcgagtctgaagcgagagctaacaacagtatcaacaggtttaatttggatttggaaacgagagtttctggtcatgaaaaacccaaagaagaaatccggaggattccggattgtcaatatgctaaaacgcggagtagcccgtgtaaaccccttgggaggtttgaagaggttgccagccggacttctgctgggtcatggacccatcagaatggttttggcgatactagcctttttgagatttacagcaatcaagccatcactgggccttatcaacagatggggttccgtggggaaaaaagaggctatggaaataataaagaagttcaagaaagatcttgctgccatgttgagaataatcaatgctaggaaagagaggaagagacgtggcgcagacaccagcatcggaatcattggcctcctgctgactacagccatggcagcagagatcactagacgcgggagtgcatactacatgtacttggataggagcgatgccgggaaggccatttcgtttgctaccacattgggagtgaacaagtgccacgtaaacaccagagagggttacagaacccaagtgaaagggccatggcacagtgaagagcttgaaatccggtttgaggaatgtccaggcaccaaggtttacgtggaggagacatgcggaactagaggaccatctctgagatcaactactgcaagtggaagggtcattgaggaatggtgctgtagggaatgcacaatgcccccactatcgtttcgagcaaaagacggctgctggtatggaatggagataaggcccaggaaagaaccagagagcaacttagtgaggtcaatggtgacagcggggtcaaccgatcatatggaccacttctctcttggagtgcttgtgattctactcatggtgcaggaggggttgaagaagagaatgaccacaaagatcatcatgagcacatcaatggcagtgctggtagtcatgatcttgggaggattttcaatgagtgacctggccaagcttgtgatcctgatgggtgctactttcgcagaaatgaacactggaggagatgtagctcacttggcattggtagcggcatttaaagtcagaccagccttgctggtctccttcattttcagagccaattggacaccccgtgagagcatgctgctagccctggcttcgtgtcttctgcaaactgcgatctctgctcttgaaggtgacttgatggtcctcattaatggatttgctttggcctggttggcaattcgagcaatggccgtgccacgcactgacaacatcgctctaccaatcttggctgctctaacaccactagctcgaggcacactgctcgtggcatggagagcgggcctggctacttgtggagggatcatgctcctctccctgaaagggaaaggtagtgtgaagaagaacctgccatttgtcatggccctgggattgacagctgtgagggtagtagaccctattaatgtggtaggactactgttactcacaaggagtgggaagcggagctggccccctagtgaagttctcacagccgttggcctgatatgtgcactggccggagggtttgccaaggcagacattgagatggctggacccatggctgcagtaggcttgctaattgtcagctatgtggtctcgggaaagagtgtggacatgtacattgaaagagcaggtgacatcacatgggaaaaggacgcggaagtcactggaaacagtcctcggcttgacgtggcactggatgagagtggtgatttctccttggtagaggaagatggtccacccatgagagagatcatactcaaggtggtcctgatggccatctgtggcatgaacccaatagctataccttttgctgcaggagcgtggtatgtgtatgtgaagactgggaaaaggagtggcgccctctgggacgtgcctgctcccaaagaagtgaagaaaggagagaccacagatggagtgtacagagtgatgactcgcagactgctaggttcaacacaggttggagtgggagtcatgcaagagggagtcttccacaccatgtggcacgttacaaaaggagccgcactgaggagcggtgagggaagacttgatccatactggggggatgtcaagcaggacttggtgtcatactgtgggccttggaagttggatgcagcttgggatggactcagcgaggtacagcttttggccgtacctcccggagagagggccagaaacattcagaccctgcctggaatattcaagacaaaggacggggacatcggagcagttgctctggactaccctgcagggacctcaggatctccgatcctagacaaatgtggaagagtgataggactctatggcaatggggttgtgatcaagaatggaagctatgttagtgctataacccagggaaagagggaggaggagactccggttgaatgtttcgaaccctcgatgctgaagaagaagcagctaactgtcttggatctgcatccaggagccggaaaaaccaggagagttcttcctgaaatagtccgtgaagccataaaaaagagactccggacagtgatcttggcaccaactagggttgtcgctgctgagatggaggaggccttgagaggacttccggtgcgttacatgacaacagcagtcaacgtcacccattctgggacagaaatcgttgatttgatgtgccatgccactttcacttcacgcttactacaacccatcagagtccctaattacaatctctacatcatggatgaagcccacttcacagacccctcaagtatagctgcaagaggatacatatcaacaagggttgaaatgggcgaggcggctgccatttttatgactgccacaccaccaggaacccgtgatgcgtttcctgactctaactcaccaatcatggacacagaagtggaagtcccagagagagcctggagctcaggctttgattgggtgacagaccattctgggaaaacagtttggttcgttccaagcgtgagaaacggaaatgaaatcgcagcctgtctgacaaaggctggaaagcgggtcatacagctcagcaggaagacttttgagacagaatttcagaaaacaaaaaatcaagagtgggactttgtcataacaactgacatctcagagatgggcgccaacttcaaggctgaccgggtcatagactctaggagatgcctaaaaccagtcatacttgatggtgagagagtcatcttggctgggcccatgcctgtcacgcatgctagtgctgctcagaggagaggacgtataggcaggaaccctaacaaacctggagatgagtacatgtatggaggtgggtgtgcagagactgatgaaggccatgcacactggcttgaagcaagaatgcttcttgacaacatctacctccaggatggcctcatagcctcgctctatcggcctgaggccgataaggtagccgccattgagggagagtttaagctgaggacagagcaaaggaagaccttcgtggaactcatgaagagaggagaccttcccgtctggctagcctatcaggttgcatctgccggaataacttacacagacagaagatggtgctttgatggcacaaccaacaacaccataatggaagacagcgtaccagcagaggtgtggacaaagtatggagagaagagagtgctcaaaccgagatggatggatgctagggtctgttcagaccatgcggccctgaagtcgttcaaagaattcgccgctggaaaaagaggagcggctttgggagtaatggaggccctgggaacactgccaggacacatgacagagaggtttcaggaagccattgacaacctcgccgtgctcatgcgagcagagactggaagcaggccttataaggcagcggcagcccaactgccggagaccctagagaccattatgctcttaggtttgctgggaacagtttcactggggatcttcttcgtcttgatgcggaataagggcatcgggaagatgggctttggaatggtaacccttggggccagtgcatggctcatgtggctttcggaaattgaaccagccagaattgcatgtgtcctcattgttgtgtttttattactggtggtgctcatacccgagccagagaagcaaagatctccccaagataaccagatggcaattatcatcatggtggcagtgggccttctaggtttgataactgcaaacgaacttggatggctggaaagaacaaaaaatgacatagctcatctaatgggaaggagagaagaaggagcaaccatgggattctcaatggacattgatctgcggccagcctccgcctgggctatctatgccgcattgacaactctcatcaccccagctgtccaacatgcggtaaccacttcatacaacaactactccttaatggcgatggccacacaagctggagtgctgtttggcatgggcaaagggatgccattttatgcatgggaccttggagtcccgctgctaatgatgggttgctattcacaattaacacccctgactctgatagtagctatcattctgcttgtggcgcactacatgtacttgatcccaggcctacaagcggcagcagcgcgtgctgcccagaaaaggacagcagctggcatcatgaagaatcccgttgtggatggaatagtggtaactgacattgacacaatgacaatagacccccaggtggagaagaagatgggacaagtgttactcatagcagtagccatctccagtgctgtgctgctgcggaccgcctggggatggggggaggctggagctctgatcacagcagcgacctccaccttgtgggaaggctctccaaacaaatactggaactcctctacagccacctcactgtgcaacatcttcagaggaagctatctggcaggagcttcccttatctatacagtgacgagaaacgctggcctggttaagagacgtggaggtgggacgggagagactctgggagagaagtggaaagctcgtctgaatcagatgtcggccctggagttctactcttataaaaagtcaggtatcactgaagtgtgtagagaggaggctcgccgtgccctcaaggatggagtggccacaggaggacatgccgtatcccggggaagtgcaaagctcagatggttggtggagagaggatatctgcagccctatgggaaggttgttgacctcggatgtggcagagggggctggagctattatgccgccaccatccgcaaagtgcaggaggtgagaggatacacaaagggaggtcccggtcatgaagaacccatgctggtgcaaagctatgggtggaacatagttcgtctcaagagtggagtggacgtcttccacatggcggctgagccgtgtgacactctgctgtgtgacataggtgagtcatcatctagtcctgaagtggaagagacacgaacactcagagtgctctctatggtgggggactggcttgaaaaaagaccaggggccttctgtataaaggtgctgtgcccatacaccagcactatgatggaaaccatggagcgactgcaacgtaggcatgggggaggattagtcagagtgccattgtctcgcaactccacacatgagatgtactgggtctctggggcaaagagcaacatcataaaaagtgtgtccaccacaagtcagctcctcctgggacgcatggatggccccaggaggccagtgaaatatgaggaggatgtgaacctcggctcgggtacacgagctgtggcaagctgtgctgaggctcctaacatgaaaatcatcggcaggcgcattgagagaatccgcaatgaacatgcagaaacatggtttcttgatgaaaaccacccatacaggacatgggcctaccatgggagctacgaagcccccacgcaaggatcagcgtcttccctcgtgaacggggttgttagactcctgtcaaagccttgggacgtggtgactggagttacaggaatagccatgactgacaccacaccatacggccaacaaagagtcttcaaagaaaaagtggacaccagggtgccagatccccaagaaggcactcgccaggtaatgaacatagtctcttcctggctgtggaaggagctggggaaacgcaagcggccacgcgtctgcaccaaagaagagtttatcaacaaggtgcgcagcaatgcagcactgggagcaatatttgaagaggaaaaagaatggaagacggctgtggaagctgtgaatgatccaaggttttgggccctagtggatagggagagagaacaccacctgagaggagagtgtcacagctgtgtgtacaacatgatgggaaaaagagaaaagaagcaaggagagttcgggaaagcaaaaggtagccgcgccatctggtacatgtggttgggagccagattcttggagtttgaagcccttggattcttgaacgaggaccattggatgggaagagaaaactcaggaggtggagtcgaagggttaggattgcaaagacttggatacattctagaagaaatgaatcgggcaccaggaggaaagatgtacgcagatgacactgctggctgggacacccgcattagtaagtttgatctggagaatgaagctctgattaccaaccaaatggaggaagggcacagaactctggcgttggccgtgattaaatacacataccaaaacaaagtggtgaaggttctcagaccagctgaaggaggaaaaacagttatggacatcatttcaagacaagaccagagagggagtggacaagttgtcacttatgctctcaacacattcaccaacttggtggtgcagcttatccggaacatggaagctgaggaagtgttagagatgcaagacttatggttgttgaggaagccagagaaagtgaccagatggttgcagagcaatggatgggatagactcaaacgaatggcggtcagtggagatgactgcgttgtgaagccaatcgatgataggtttgcacatgccctcaggttcttgaatgacatgggaaaagttaggaaagacacacaggagtggaaaccctcgactggatggagcaattgggaagaagtcccgttctgctcccaccacttcaacaagctgtacctcaaggatgggagatccattgtggtcccttgccgccaccaagatgaactgattggccgagctcgcgtctcaccaggggcaggatggagcatccgggagactgcctgtcttgcaaaatcatatgcgcagatgtggcagctcctttatttccacagaagagaccttcgactgatggctaatgccatttgctcggctgtgccagttgactgggtaccaactgggagaaccacctggtcaatccatggaaagggagaatggatgaccactgaggacatgctcatggtgtggaatagagtgtggattgaggagaacgaccatatggaggacaagactcctgtaacaaaatggacagacattccctatctaggaaaaagggaggacttatggtgtggatcccttatagggcacagaccccgcaccacttgggctgaaaacatcaaagacacagtcaacatggtgcgcaggatcataggtgatgaagaaaagtacatggactatctatccacccaagtccgctacttgggtgaggaagggtccacacccggagtgttgtaagcaccaattttagtgttgtcaggcctgctagtcagccacagtttggggaaagctgtgcagcctgtaacccccccaggagaagctgggaaaccaagctcatagtcaggccgagaacgccatggcacggaagaagccatgctgcctgtgagcccctcagaggacactgagtcaaaaaaccccacgcgcttggaagcgcaggatgggaaaagaaggtggcgaccttccccacccttcaatctggggcctgaactggagactagctgtgaatctccagcagagggactagtggttagaggagaccccccggaaaacgcaaaacagcatattgacgctgggaaagaccagagactccatgagtttccaccacgctggccgccaggcacagatcgccgaacttcggcggccggtgtggggaaatccatggtttct

SEQ ID NO: 33 - DNA, 8137 bp, Artificial Sequence
  Synthetic sequence
agttgttgatctgtgtgagtcagactgcgacagttcgagtctgaagcgagagctaacaacagtatcaacaggtttaatttggatttggaaacgagagtttctggtcatgaaaaacccaaagaagaaatccggaggattccggattgtcaatatgctaaaacgcggagtagcccgtgtaaaccccttgggaggtttgaagaggttgccagccggacttctgctgggtcatggacccatcagaatggttttggcgatactagcctttttgagatttacagcaatcaagccatcactgggccttatcaacagatggggttccgtggggaaaaaagaggctatggaaataataaagaagttcaagaaagatcttgctgccatgttgagaataatcaatgctaggaaagagaggaagagacgtggcgcagacaccagcatcggaatcattggcctcctgctgactacagccatggcagcagagatcactagacgcgggagtgcatactacatgtacttggataggagcgatgccgggaaggccatttcgtttgctaccacattgggagtgaacaagtgccacgtacacaccagagagggttacagaacccaagtgaaagggccatggcacagtgaagagcttgaaatccggtttgaggaatgtccaggcaccaaggtttacgtggaggagacatgcggaactagaggaccatctctgagatcaactactgcaagtggaagggtcattgaggaatggtgctgtagggaatgcacaatgcccccactatcgtttcgagcaaaagacggctgctggtatggaatggagataaggcccaggaaagaaccagagagcaacttagtgaggtcaatggtgacagcggggtcaaccgatcatatggaccacttctctcttggagtgcttgtgattctactcatggtgcaggaggggttgaagaagagaatgaccacaaagatcatcatgagcacatcaatggcagtgctggtagtcatgatcttgggaggattttcaatgagtgacctggccaagcttgtgatcctgatgggtgctactttcgcagaaatgaacactggaggagatgtagctcacttggcattggtagcggcatttaaagtcagaccagccttgctggtctccttcattttcagagccaattggacaccccgtgagagcatgctgctagccctggcttcgtgtcttctgcaaactgcgatctctgctcttgaaggtgacttgatggtcctcattaatggatttgctttggcctggttggcaattcgagcaatggccgtgccacgcactgacaacatcgctctaccaatcttggctgctctaacaccactagctcgaggcacactgctcgtggcatggagagcgggcctggctacttgtggagggatcatgctcctctccctgaaagggaaaggtagtgtgaagaagaacctgccatttgtcatggccctgggattgacagctgtgagggtagtagaccctattaatgtggtaggactactgttactcacaaggagtgggaagcggagctggccccctagtgaagttctcacagccgttggcctgatatgtgcactggccggagggtttgccaaggcagacattgagatggctggacccatggctgcagtaggcttgctaattgtcagctatgtggtctcgggaaagagtgtggacatgtacattgaaagagcaggtgacatcacatgggaaaaggacgcggaagtcactggaaacagtcctcggcttgacgtggcactggatgagagtggtgatttctccttggtagaggaagatggtccacccatgagagagatcatactcaaggtggtcctgatggccatctgtggcatgaacccaatagctataccttttgctgcaggagcgtggtatgtgtatgtgaagactgggaaaaggagtggcgccctctgggacgtgcctgctcccaaagaagtgaagaaaggagagaccacagatggagtgtacagagtgatgactcgcagactgctaggttcaacacaggttggagtgggagtcatgcaagagggagtcttccacaccatgtggcacgttacaaaaggagccgcactgaggagcggtgagggaagacttgatccatactggggggatgtcaagcaggacttggtgtcatactgtgggccttggaagttggatgcagcttgggatggactcagcgaggtacagcttttggccgtacctcccggagagagggccagaaacattcagaccctgcctggaatattcaagacaaaggacggggacatcggagcagttgctctggactaccctgcagggacctcaggatctccgatcctagacaaatgtggaagagtgataggactctatggcaatggggttgtgatcaagaatggaagctatgttagtgctataacccagggaaagagggaggaggagactccggttgaatgtttcgaaccctcgatgctgaagaagaagcagctaactgtcttggatctgcatccaggagccggaaaaaccaggagagttcttcctgaaatagtccgtgaagccataaaaaagagactccggacagtgatcttggcaccaactagggttgtcgctgctgagatggaggaggccttgagaggacttccggtgcgttacatgacaacagcagtcaacgtcacccattctgggacagaaatcgttgatttgatgtgccatgccactttcacttcacgcttactacaacccatcagagtccctaattacaatctctacatcatggatgaagcccacttcacagacccctcaagtatagctgcaagaggatacatatcaacaagggttgaaatgggcgaggcggctgccatttttatgactgccacaccaccaggaacccgtgatgcgtttcctgactctaactcaccaatcatggacacagaagtggaagtcccagagagagcctggagctcaggctttgattgggtgacagaccattctgggaaaacagtttggttcgttccaagcgtgagaaacggaaatgaaatcgcagcctgtctgacaaaggctggaaagcgggtcatacagctcagcaggaagacttttgagacagaatttcagaaaacaaaaaatcaagagtgggactttgtcataacaactgacatctcagagatgggcgccaacttcaaggctgaccgggtcatagactctaggagatgcctaaaaccagtcatacttgatggtgagagagtcatcttggctgggcccatgcctgtcacgcatgctagtgctgctcagaggagaggacgtataggcaggaaccctaacaaacctggagatgagtacatgtatggaggtgggtgtgcagagactgatgaaggccatgcacactggcttgaagcaagaatgcttcttgacaacatctacctccaggatggcctcatagcctcgctctatcggcctgaggccgataaggtagccgccattgagggagagtttaagctgaggacagagcaaaggaagaccttcgtggaactcatgaagagaggagaccttcccgtctggctagcctatcaggttgcatctgccggaataacttacacagacagaagatggtgctttgatggcacaaccaacaacaccataatggaagacagcgtaccagcagaggtgtggacaaagtatggagagaagagagtgctcaaaccgagatggatggatgctagggtctgttcagaccatgcggccctgaagtcgttcaaagaattcgccgctggaaaaagaggagcggctttgggagtaatggaggccctgggaacactgccaggacacatgacagagaggtttcaggaagccattgacaacctcgccgtgctcatgcgagcagagactggaagcaggccttataaggcagcggcagcccaactgccggagaccctagagaccattatgctcttaggtttgctgggaacagtttcactggggatcttcttcgtcttgatgcggaataagggcatcgggaagatgggctttggaatggtaacccttggggccagtgcatggctcatgtggctttcggaaattgaaccagccagaattgcatgtgtcctcattgttgtgtttttattactggtggtgctcatacccgagccagagaagcaaagatctccccaagataaccagatggcaattatcatcatggtggcagtgggccttctaggtttgataactgcaaacgaacttggatggctggaaagaacaaaaaatgacatagctcatctaatgggaaggagagaagaaggagcaaccatgggattctcaatggacattgatctgcggccagcctccgcctgggctatctatgccgcattgacaactctcatcaccccagctgtccaacatgcggtaaccacttcatacaacaactactccttaatggcgatggccacacaagctggagtgctgtttggcatgggcaaagggatgccattttatgcatgggaccttggagtcccgctgctaatgatgggttgctattcacaattaacacccctgactctgatagtagctatcattctgcttgtggcgcactacatgtacttgatcccaggcctacaagcggcagcagcgcgtgctgcccagaaaaggacagcagctggcatcatgaagaatcccgttgtggatggaatagtggtaactgacattgacacaatgacaatagacccccaggtggagaagaagatgggacaagtgttactcatagcagtagccatctccagtgctgtgctgctgcggaccgcctggggatggggggaggctggagctctgatcacagcagcgacctccaccttgtgggaaggctctccaaacaaatactggaactcctctacagccacctcactgtgcaacatcttcagaggaagctatctggcaggagcttcccttatctatacagtgacgagaaacgctggcctggttaagagacgtggaggtgggacgggagagactctgggagagaagtggaaagctcgtctgaatcagatgtcggccctggagttctactcttataaaaagtcaggtatcactgaagtgtgtagagaggaggctcgccgtgccctcaaggatggagtggccacaggaggacatgccgtatcccggggaagtgcaaagctcagatggttggtggagagaggatatctgcagccctatgggaaggttgttgacctcggatgtggcagagggggctggagctattatgccgccaccatccgcaaagtgcaggaggtgagaggatacacaaagggaggtcccggtcatgaagaacccatgctggtgcaaagctatgggtggaacatagttcgtctcaagagtggagtggacgtcttccacatggcggctgagccgtgtgacactctgctgtgtgacataggtgagtcatcatctagtcctgaagtggaagagacacgaacactcagagtgctctctatggtgggggactggcttgaaaaaagaccaggggccttctgtataaaggtgctgtgcccatacaccagcactatgatggaaaccatggagcgactgcaacgtaggcatgggggaggattagtcagagtgccattgtctcgcaactccacacatgagatgtactgggtctctggggcaaagagcaacatcataaaaagtgtgtccaccacaagtcagctcctcctgggacgcatggatggccccaggaggccagtgaaatatgaggaggatgtgaacctcggctcgggtacacgagctgtggcaagctgtgctgaggctcctaacatgaaaatcatcggcaggcgcattgagagaatccgcaatgaacatgcagaaacatggtttcttgatgaaaaccacccatacaggacatgggcctaccatgggagctacgaagcccccacgcaaggatcagcgtcttccctcgtgaacggggttgttagactcctgtcaaagccttgggacgtggtgactggagttacaggaatagccatgactgacaccacaccatacggccaacaaagagtcttcaaagaaaaagtggacaccagggtgccagatccccaagaaggcactcgccaggtaatgaacatagtctcttcctggctgtggaaggagctggggaaacgcaagcggccacgcgtctgcaccaaagaagagtttatcaacaaggtgcgcagcaatgcagcactgggagcaatatttgaagaggaaaaagaatggaagacggctgtggaagctgtgaatgatccaaggttttgggccctagtggatagggagagagaacaccacctgagaggagagtgtcacagctgtgtgtacaacatgatgggaaaaagagaaaagaagcaaggagagttcgggaaagcaaaaggtagccgcgccatctggtacatgtggttgggagccagattcttggagtttgaagcccttggattcttgaacgaggaccattggatgggaagagaaaactcaggaggtggagtcgaagggttaggattgcaaagacttggatacattctagaagaaatgaatcgggcaccaggaggaaagatgtacgcagatgacactgctggctgggacacccgcattagtaagtttgatctggagaatgaagctctgattaccaaccaaatggaggaagggcacagaactctggcgttggccgtgattaaatacacataccaaaacaaagtggtgaaggttctcagaccagctgaaggaggaaaaacagttatggacatcatttcaagacaagaccagagagggagtggacaagttgtcacttatgctctcaacacattcaccaacttggtggtgcagcttatccggaacatggaagctgaggaagtgttagagatgcaagacttatggttgttgaggaagccagagaaagtgaccagatggttgcagagcaatggatgggatagactcaaacgaatggcggtcagtggagatgactgcgttgtgaagccaatcgatgataggtttgcacatgccctcaggttcttgaatgacatgggaaaagttaggaaagacacacaggagtggaaaccctcgactggatggagcaattgggaagaagtcccgttctgctcccaccacttcaacaagctgtacctcaaggatgggagatccattgtggtcccttgccgccaccaagatgaactgattggccgagctcgcgtctcaccaggggcaggatggagcatccgggagactgcctgtcttgcaaaatcatatgcgcagatgtggcagctcctttatttccacagaagagaccttcgactgatggctaatgccatttgctcggctgtgccagttgactgggtaccaactgggagaaccacctggtcaatccatggaaagggagaatggatgaccactgaggacatgctcatggtgtggaatagagtgtggattgaggagaacgaccatatggaggacaagactcctgtaacaaaatggacagacattccctatctaggaaaaagggaggacttatggtgtggatcccttatagggcacagaccccgcaccacttgggctgaaaacatcaaagacacagtcaacatggtgcgcaggatcataggtgatgaagaaaagtacatggactatctatccacccaagtccgctacttgggtgaggaagggtccacacccggagtgttgtaagcaccaattttagtgttgtcaggcctgctagtcagccacagtttggggaaagctgtgcagcctgtaacccccccaggagaagctgggaaaccaagctcatagtcaggccgagaacgccatggcacggaagaagccatgctgcctgtgagcccctcagaggacactgagtcaaaaaaccccacgcgcttggaagcgcaggatgggaaaagaaggtggcgaccttccccacccttcaatctggggcctgaactggagactagctgtgaatctccagcagagggactagtggttagaggagaccccccggaaaacgcaaaacagcatattgacgctgggaaagaccagagactccatgagtttccaccacgctggccgccaggcacagatcgccgaacttcggcggccggtgtggggaaatccatggtttct

SEQ ID NO: 34 - DNA, 9163 bp, Artificial Sequence
  Synthetic sequence
atggctgcgtgagacacacgtagcctaccagtttcttactgctctactctgcaaagcaagagattaataacccatcatggatcctgtgtacgtggacatagacgctgacagcgcctttttgaaggccctgcaacgtgcgtaccccatgtttgaggtggaaccaaggcaggtcacaccgaatgaccatgctaatgctagagcgttctcgcatctagctataaaactaatagagcaggaaattgaccccgactcaaccatcctggatatcggcagtgcgccagcaaggaggatgatgtcggacaggaagtaccactgcgtctgcccgatgcgcagtgcggaagatcccgagagactcgccaattatgcgagaaagctagcatctgccgcaggaaaagtcctggacagaaacatctctggaaagatcggggacttacgagcttggtccctatcctcgaaacagcggggataaaactaaatgataggcagtggtctcagataattcaagccttcaaagaagacaaagcatactcacctgaagtagccctgaatgaaatatgtacgcgcatgtatggggtggatctagacagcgggctattttctaaaccgttggtgtctgtgtattacgcggataaccactgggataataggcctggagggaaaatgttcggatttaaccccgaggcagcatccattctagaaagaaagtatccattcacaaaagggaagtggaacatcaacaagcagatctgcgtgactaccaggaggatagaagactttaaccctaccaccaacatcataccggccaacaggagactaccacactcattagtggccgaacaccgcccagtaaaaggggaaagaatggaatggctggttaacaagataaacggccaccacgtgctcctggtcagtggctataaccttgcactgcctactaagagagtcacttgggtagcgccgttaggtgtccgtggagcggactacacatacaacctagagttgggtctgccagcaacgcttggtaggtatgacctagtggtcataaacatccacacaccttttcgcatacaccattaccaacagtgcgtcgaccacgcaatgaaactgcaaatgctcgggggtgactcattgagactgctcaaaccgggcggctctctattgatcagagcatatggttacgcagatagaaccagtgaacgagtcatctgcgtattgggacgcaagtttagatcgtctagagcgttgaaaccaccatgtgtcaccagcaacactgagatgtttttcctattcagcaactttgacaatggcagaaggaatttcacaactcatgtcatgaacaatcaactgaatgcagccttcgtaggacaggtcacccgagcaggatgtgcaccgtcgtaccgggtaaaacgcatggacatcgcgaagaacgatgaagagtgcgtagtcaacgccgctaaccctcgcgggttaccgggtgacggtgtttgcaaggcagtatacaaaaaatggccggagtcctttaagaacagtgcaacaccagtgggaaccgcaaaaacagttatgtgcggtacgtatccagtaatccacgctgttggaccaaacttctctaattattcggagtctgaaggggaccgggaattggcagctgcctatcgagaagtcgcaaaggaagtaactaggctgggagtaaatagtgtagctatacctctcctctccacaggtgtatactcaggagggaaagacaggctgacccagtcactgaaccacctctttacagccatggactcgacggatgcagacgtggtcatctactgccgcgacaaagaatgggagaagaaaatatctgaggccatacagatgcggacccaagtagagctgctggatgagcacatctccatagactgcgatattgttcgcgtgcaccctgacagcagcttggcaggcagaaaaggatacagcaccacggaaggcgcactgtactcatatctagaagggacccgttttcatcagacggctgtggatatggcggagatacatactatgtggccaaagcaaacagaggccaatgagcaagtctgcctatatgccctgggggaaagtattgaatcgatcaggcagaaatgcccggtggatgatgcagacgcatcatctccccccaaaactgtcccgtgcctttgccgttacgctatgactccagaacgcgtcacccggcttcgcatgaaccacgtcacaagcataattgtgtgttcttcgtttcccctcccaaagtacaaaatagaaggagtgcaaaaagtcaaatgctctaaggtaatgctatttgaccacaacgtgccatcgcgcgtaagtccaagggaatatagatcttcccaggagtctgcacaggaggcgagtacaatcacgtcactgacgcatagtcaattcgacctaagcgttgatggcgagatactgcccgtcccgtcagacctggatgctgacgccccagccctagaaccagcactagacgacggggcgacacacacgctgccatccacaaccggaaaccttgcggccgtgtctgattgggtaatgagcaccgtacctgtcgcgccgcccagaagaaggcgagggagaaacctgactgtgacatgtgacgagagagaagggaatataacacccatggctagcgtccgattctttagggcagagctgtgtccggtcgtacaagaaacagcggagacgcgtgacacagcaatgtctcttcaggcaccaccgagtaccgccacggaaccgaatcatccgccgatctccttcggagcatcaagcgagacgttccccattacatttggggacttcaacgaaggagaaatcgaaagcttgtcttctgagctactaactttcggagacttcttaccaggagaagtggatgacttgacagacagcgactggtccacgtgctcagacacggacgacgagttatgactagacagggcaggtgggtatatattctcgtcggacaccggtccaggtcatttacaacagaagtcagtacgccagtcagtgctgccggtgaacaccctggaggaagtccacgaggagaagtgttacccacctaagctggatgaagcaaaggagcaactattacttaagaaactccaggagagtgcatccatggccaacagaagcaggtatcagtcgcgcaaagtagaaaacatgaaagcagcaatcatccagagactaaagagaggctgtagactatacttaatgtcagagaccccaaaagtccctacttaccggactacatatccggcgcctgtgtactcgcctccgatcaacgtccgattgtccaatcccgagtccgcagtggcagcatgcaatgagttcttagctagaaactatccaactgtctcatcataccaaattaccgacgagtatgatgcatatctagacatggtggacgggtcggagagttgcctggaccgagcgacattcaatccgtcaaaactcaggagctacccgaaacagcacgcttaccacgcgccctccatcagaagcgctgtaccgtccccattccagaacacactacagaatgtactggcagcagccacgaaaagaaactgcaacgtcacacagatgagggaattacccactttggactcagcagtattcaacgtggagtgtttcaaaaaattcgcatgcaaccaagaatactgggaagaatttgctgccagccctattaggataacaactgagaatttagcaacctatgttactaaactaaaagggccaaaagcagcagcgctattcgcaaaaacccataatctactgccactacaggaagtaccaatggataggttcacagtagatatgaaaagggacgtaaaggtgactcctggtacaaagcatacagaggaaagacctaaggtgcaggttatacaggcggctgaacccttggcgacagcatacctatgtgggattcacagagagctggttaggaggctgaacgccgtcctcctacccaatgtacatacactatttgacatgtctgccgaggatttcgatgccatcatagccgcacactttaagccaggagacactgttttggaaacggacatagcctcctttgataagagccaagatgattcacttgcgcttactgctttgatgctgttagaggatttaggggtggatcactccctgctggacttgatagaggctgctttcggagagatttccagctgtcacctaccgacaggtacgcgcttcaagttcggcgccatgatgaaatcaggtatgttcctaactctgttcgtcaacacattgttaaacatcaccatcgccagccgagtgctggaagatcgtctgacaaaatccgcgtgcgcggccttcatcggcgacgacaacataatacatggagtcgtctccgatgaattgatggcagccagatgtgccacttggatgaacatggaagtgaagatcatagatgcagttgtatccttgaaagccccttacttttgtggagggtttatactgcacgatactgtgacaggaacagcttgcagagtggcagacccgctaaaaaggctttttaaactgggcaaaccgctagcggcaggtgacgaacaagatgaagatagaagacgagcgctggctgacgaagtgatcagatggcaacgaacagggctaattgatgagctggagaaagcggtatactctaggtacgaagtgcagggtatatcagttgtggtaatgtccatggccacctttgcaagctccagatccaacttcgagaagctcagaggacccgtcataactttgtacggcggtcctaaataggtacgcactacagctacctattttgcagaagccgacagcaagtatctaaacactaatcagctacaatggagttcatcccaacccaaactttttacaataggaggtaccagcctcgaccctggactccgcgccctactatccaagtcatcaggcccagaccgcgccctcagaggcaagctgggcaacttgcccagctgatctcagcagttaataaactgacaatgcgcgcggtaccccaacagaagccacgcaggaatcggaagaataagaagcaaaagcaaaaacaacaggcgccacaaaacaacacaaatcaaaagaagcagccacctaaaaagaaaccggctcaaaagaaaaagaagccgggccgcagagagaggatgtgcatgaaaatcgaaaatgattgtattttcgaagtcaagcacgaaggtaaggtaacaggttacgcgtgcctggtgggggacaaagtaatgaaaccagcacacgtaaaggggaccatcgataacgcggacctggccaaactggcctttaagcggtcatctaagtatgaccttgaatgcgcgcagatacccgtgcacatgaagtccgacgcttcgaagttcacccatgagaaaccggaggggtactacaactggcaccacggagcagtacagtactcaggaggccggttcaccatccctacaggtgctggcaaaccaggggacagcggcagaccgatcttcgacaacaagggacgcgtggtggccatagtcttaggaggagctaatgaaggagcccgtacagccctctcggtggtgacctggaataaagacattgtcactaaaatcacccccgagggggccgaagagtggagtcttgccatcccagttatgtgcctgttggcaaacaccacgttcccctgctcccagcccccttgcacgccctgctgctacgaaaaggaaccggaggaaaccctacgcatgcttgaggacaacgtcatgagacctgggtactatcagctgctacaagcatccttaacatgttctccccaccgccagcgacgcagcaccaaggacaacttcaatgtctataaagccacaagaccatacttagctcactgtcccgactgtggagaagggcactcgtgccatagtcccgtagcactagaacgcatcagaaatgaagcgacagacgggacgctgaaaatccaggtctccttgcaaatcggaataaagacggatgacagccacgattggaccaagctgcgttatatggacaaccacatgccagcagacgcagagagggcggggctatttgtaagaacatcagcaccgtgtacgattactggaacaatgggacacttcatcctggcccgatgtccaaaaggggaaactctgacggtgggattcactgacagtaggaagattagtcactcatgtacgcacccatttcaccacgaccctcctgtgataggtcgggaaaaattccattcccgaccgcagcacggtaaagagctaccttgcagcacgtacgtgcagagcaccgccgcaactaccgaggagatagaggtacacatgcccccagacacccctgatcgcacattaatgtcacaacagtccggcaacgtaaagatcacagtcaatggccagacggtgcggtacaagtgtaattgcggtggctcaaatgaaggactaacaactacagacaaagtgattaataactgcaaggttgatcaatgtcatgccgcggtcaccaatcacaaaaagtggcagtataactcccctctggtcccgcgtaatgctgaacttggggaccgaaaaggaaaaattcacatcccgtttccgctggcaaatgtaacatgcagggtgcctaaagcaaggaaccccaccgtgacgtacgggaaaaaccaagtcatcatgctactgtatcctgaccacccaacactcctgtcctaccggaatatgggagaagaaccaaactatcaagaagagtgggtgatgcataagaaggaagtcgtgctaaccgtgccgactgaagggctcgaggtcacgtggggcaacaacgagccgtataagtattggccgcagttatctacaaacggtacagcccatggccacccgcacgagataattctgtattattatgagctgtaccccactatgactgtagtagttgtgtcagtggccacgttcatactcctgtcgatggtgggtatggcagcggggatgtgcatgtgtgcacgacgcagatgcatcacaccgtatgaactgacaccaggagctaccgtccctttcctgcttagcctaatatgctgcatcagaacagctaaagcggccacataccaagaggctgcgatatacctgtggaacgagcagcaacctttgttttggctacaagcccttattccgctggcagccctgattgttctatgcaactgtctgagactcttaccatgctgctgtaaaacgttggcttttttagccgtaatgagcgtcggtgcccacactgtgagcgcgtacgaacacgtaacagtgatcccgaacacggtgggagtaccgtataagactctagtcaatagacctggctacagccccatggtattggagatggaactactgtcagtcactttggagccaacactatcgcttgattacatcacgtgcgagtacaaaaccgtcatcccgtctccgtacgtgaagtgctgcggtacagcagagtgcaaggacaaaaacctacctgactacagctgtaaggtcttcaccggcgtctacccatttatgtggggcggcgcctactgcttctgcgacgctgaaaacacgcagttgagcgaagcacacgtggagaagtccgaatcatgcaaaacagaatttgcatcagcatacagggctcataccgcatctgcatcagctaagctccgcgtcctttaccaaggaaataacatcactgtaactgcctatgcaaacggcgaccatgccgtcacagttaaggacgccaaattcattgtggggccaatgtcttcagcctggacacctttcgacaacaaaattgtggtgtacaaaggtgacgtctataacatggactacccgccctttggcgcaggaagaccaggacaatttggcgatatccaaagtcgcacacctgagagtaaagacgtctatgctaatacacaactggtactgcagagaccggctgtgggtacggtacacgtgccatactctcaggcaccatctggctttaagtattggctaaaagaacgcggggcgtcgctgcagcacacagcaccatttggctgccaaatagcaacaaacccggtaagagcggtgaactgcgccgtagggaacatgcccatctccatcgacataccggaagcggccttcactagggtcgtcgacgcgccctctttaacggacatgtcgtgcgaggtaccagcctgcacccattcctcagactttgggggcgtcgccattattaaatatgcagccagcaagaaaggcaagtgtgcggtgcattcgatgactaacgccgtcactattcgggaagctgagatagaagttgaagggaattctcagctgcaaatctctttctcgacggccttagccagcgccgaattccgcgtacaagtctgttctacacaagtacactgtgcagccgagtgccaccccccgaaggaccacatagtcaactacccggcgtcacataccaccctcggggtccaggacatctccgctacggcgatgtcatgggtgcagaagatcacgggaggtgtgggactggttgttgctgttgccgcactgattctaatcgtggtgctatgcgtgtcgttcagcaggcactaacttgacaattaagtatgaaggtatatgtgtcccctaagagacacactgtacatagcaaataatctatagatcaaagggctacgcaacccctgaatagtaacaaaatataaaatcactaaaaattataaaaacagaaaaatacataaataggtatacgtgtcccctaagagacacattgtatgtaggtgataagtatagatcaaagggccgaataacccctgaatagtaacaaaatatgaaaatcaataaaaatcataaaatagaaaaaccataaacagaagtagttcaaagggctataaaacccctgaatagtaacaaaacataaaattaataaaaatcaaatgaataccataattggcaaacggaagagatgtaggtacttaagcttcctaaaagcagccgaactcactttgagaagtaggcatagcataccgaactcttccacgattctccgaacccacagggacgtaggagatgttattttgtttttaatatttcaaaaaaaaaaaaaaaaaaaaaaaaaaaaaaaaaaaaaaaaa

SEQ ID NO: 35 - DNA, 9636 bp, Artificial Sequence
  Synthetic sequence
atggctgcgtgagacacacgtagcctaccagtttcttactgctctactctgcaaagcaagagattaataacccatcatggatcctgtgtacgtggacatagacgctgacagcgcctttttgaaggccctgcaacgtgcgtaccccatgtttgaggtggaaccaaggcaggtcacaccgaatgaccatgctaatgctagagcgttctcgcatctagctataaaactaatagagcaggaaattgaccccgactcaaccatcctggatatcggcagtgcgccagcaaggaggatgatgtcggacaggaagtaccactgcgtctgcccgatgcgcagtgcggaagatcccgagagactcgccaattatgcgagaaagctagcatctgccgcaggaaaagtcctggacagaaacatctctggaaagatcggggacttacaagcagtaatggccgtgccagacacggagacgccaacattctgcttacacacagacgtctcatgtagacagagagcagacgtcgctatataccaagacgtctatgctgtacacgcacccacgtcgctataccaccaggcgattaaaggggtccgagtggcgtactgggttgggttcgacacaaccccgttcatgtacaatgccatggcgggtgcctacccctcatactaacccgctctatgcatcaacgtcagagcacgtcaacgtactcctaacgcgtacggaaggtaaactggtatggaagacactttccggcgacccgtggataaagacgctgcagaacccaccgaaaggaaacttcaaagcaactattaaggagtgggaggtggagcatgcatcaataatggcgggcatctgcagtcaccaaatgaccttcgatacattccaaaataaagccaacgtttgttgggctaagagcttggtccctatcctcgaaacagcggggataaaactaaatgataggcagtggtctcagataattcaagccttcaaagaagacaaagcatactcacctgaagtagccctgaatgaaatatgtacgcgcatgtatggggtggatctagacagcgggctattttctaaaccgttggtgtctgtgtattacgcggataaccactgggataataggcctggagggaaaatgttcggatttaaccccgaggcagcatccattctagaaagaaagtatccattcacaaaagggaagtggaacatcaacaagcagatctgcgtgactaccaggaggatagaagactttaaccctaccaccaacatcataccggccaacaggagactaccacactcattagtggccgaacaccgcccagtaaaaggggaaagaatggaatggctggttaacaagataaacggccaccacgtgctcctggtcagtggctataaccttgcactgcctactaagagagtcacttgggtagcgccgttaggtgtccgtggagcggactacacatacaacctagagttgggtctgccagcaacgcttggtaggtatgacctagtggtcataaacatccacacaccttttcgcatacaccattaccaacagtgcgtcgaccacgcaatgaaactgcaaatgctcgggggtgactcattgagactgctcaaaccgggcggctctctattgatcagagcatatggttacgcagatagaaccagtgaacgagtcatctgcgtattgggacgcaagtttagatcgtctagagcgttgaaaccaccatgtgtcaccagcaacactgagatgtttttcctattcagcaactttgacaatggcagaaggaatttcacaactcatgtcatgaacaatcaactgaatgcagccttcgtaggacaggtcacccgagcaggatgtgcaccgtcgtaccgggtaaaacgcatggacatcgcgaagaacgatgaagagtgcgtagtcaacgccgctaaccctcgcgggttaccgggtgacggtgtttgcaaggcagtatacaaaaaatggccggagtcctttaagaacagtgcaacaccagtgggaaccgcaaaaacagttatgtgcggtacgtatccagtaatccacgctgttggaccaaacttctctaattattcggagtctgaaggggaccgggaattggcagctgcctatcgagaagtcgcaaaggaagtaactaggctgggagtaaatagtgtagctatacctctcctctccacaggtgtatactcaggagggaaagacaggctgacccagtcactgaaccacctctttacagccatggactcgacggatgcagacgtggtcatctactgccgcgacaaagaatgggagaagaaaatatctgaggccatacagatgcggacccaagtagagctgctggatgagcacatctccatagactgcgatattgttcgcgtgcaccctgacagcagcttggcaggcagaaaaggatacagcaccacggaaggcgcactgtactcatatctagaagggacccgttttcatcagacggctgtggatatggcggagatacatactatgtggccaaagcaaacagaggccaatgagcaagtctgcctatatgccctgggggaaagtattgaatcgatcaggcagaaatgcccggtggatgatgcagacgcatcatctccccccaaaactgtcccgtgcctttgccgttacgctatgactccagaacgcgtcacccggcttcgcatgaaccacgtcacaagcataattgtgtgttcttcgtttcccctcccaaagtacaaaatagaaggagtgcaaaaagtcaaatgctctaaggtaatgctatttgaccacaacgtgccatcgcgcgtaagtccaagggaatatagatcttcccaggagtctgcacaggaggcgagtacaatcacgtcactgacgcatagtcaattcgacctaagcgttgatggcgagatactgcccgtcccgtcagacctggatgctgacgccccagccctagaaccagcactagacgacggggcgacacacacgctgccatccacaaccggaaaccttgcggccgtgtctgattgggtaatgagcaccgtacctgtcgcgccgcccagaagaaggcgagggagaaacctgactgtgacatgtgacgagagagaagggaatataacacccatggctagcgtccgattctttagggcagagctgtgtccggtcgtacaagaaacagcggagacgcgtgacacagcaatgtctcttcaggcaccaccgagtaccgccacggaaccgaatcatccgccgatctccttcggagcatcaagcgagacgttccccattacatttggggacttcaacgaaggagaaatcgaaagcttgtcttctgagctactaactttcggagacttcttaccaggagaagtggatgacttgacagacagcgactggtccacgtgctcagacacggacgacgagttatgactagacagggcaggtgggtatatattctcgtcggacaccggtccaggtcatttacaacagaagtcagtacgccagtcagtgctgccggtgaacaccctggaggaagtccacgaggagaagtgttacccacctaagctggatgaagcaaaggagcaactattacttaagaaactccaggagagtgcatccatggccaacagaagcaggtatcagtcgcgcaaagtagaaaacatgaaagcagcaatcatccagagactaaagagaggctgtagactatacttaatgtcagagaccccaaaagtccctacttaccggactacatatccggcgcctgtgtactcgcctccgatcaacgtccgattgtccaatcccgagtccgcagtggcagcatgcaatgagttcttagctagaaactatccaactgtctcatcataccaaattaccgacgagtatgatgcatatctagacatggtggacgggtcggagagttgcctggaccgagcgacattcaatccgtcaaaactcaggagctacccgaaacagcacgcttaccacgcgccctccatcagaagcgctgtaccgtccccattccagaacacactacagaatgtactggcagcagccacgaaaagaaactgcaacgtcacacagatgagggaattacccactttggactcagcagtattcaacgtggagtgtttcaaaaaattcgcatgcaaccaagaatactgggaagaatttgctgccagccctattaggataacaactgagaatttagcaacctatgttactaaactaaaagggccaaaagcagcagcgctattcgcaaaaacccataatctactgccactacaggaagtaccaatggataggttcacagtagatatgaaaagggacgtaaaggtgactcctggtacaaagcatacagaggaaagacctaaggtgcaggttatacaggcggctgaacccttggcgacagcatacctatgtgggattcacagagagctggttaggaggctgaacgccgtcctcctacccaatgtacatacactatttgacatgtctgccgaggatttcgatgccatcatagccgcacactttaagccaggagacactgttttggaaacggacatagcctcctttgataagagccaagatgattcacttgcgcttactgctttgatgctgttagaggatttaggggtggatcactccctgctggacttgatagaggctgctttcggagagatttccagctgtcacctaccgacaggtacgcgcttcaagttcggcgccatgatgaaatcaggtatgttcctaactctgttcgtcaacacattgttaaacatcaccatcgccagccgagtgctggaagatcgtctgacaaaatccgcgtgcgcggccttcatcggcgacgacaacataatacatggagtcgtctccgatgaattgatggcagccagatgtgccacttggatgaacatggaagtgaagatcatagatgcagttgtatccttgaaagccccttacttttgtggagggtttatactgcacgatactgtgacaggaacagcttgcagagtggcagacccgctaaaaaggctttttaaactgggcaaaccgctagcggcaggtgacgaacaagatgaagatagaagacgagcgctggctgacgaagtgatcagatggcaacgaacagggctaattgatgagctggagaaagcggtatactctaggtacgaagtgcagggtatatcagttgtggtaatgtccatggccacctttgcaagctccagatccaacttcgagaagctcagaggacccgtcataactttgtacggcggtcctaaataggtacgcactacagctacctattttgcagaagccgacagcaagtatctaaacactaatcagctacaatggagttcatcccaacccaaactttttacaataggaggtaccagcctcgaccctggactccgcgccctactatccaagtcatcaggcccagaccgcgccctcagaggcaagctgggcaacttgcccagctgatctcagcagttaataaactgacaatgcgcgcggtaccccaacagaagccacgcaggaatcggaagaataagaagcaaaagcaaaaacaacaggcgccacaaaacaacacaaatcaaaagaagcagccacctaaaaagaaaccggctcaaaagaaaaagaagccgggccgcagagagaggatgtgcatgaaaatcgaaaatgattgtattttcgaagtcaagcacgaaggtaaggtaacaggttacgcgtgcctggtgggggacaaagtaatgaaaccagcacacgtaaaggggaccatcgataacgcggacctggccaaactggcctttaagcggtcatctaagtatgaccttgaatgcgcgcagatacccgtgcacatgaagtccgacgcttcgaagttcacccatgagaaaccggaggggtactacaactggcaccacggagcagtacagtactcaggaggccggttcaccatccctacaggtgctggcaaaccaggggacagcggcagaccgatcttcgacaacaagggacgcgtggtggccatagtcttaggaggagctaatgaaggagcccgtacagccctctcggtggtgacctggaataaagacattgtcactaaaatcacccccgagggggccgaagagtggagtcttgccatcccagttatgtgcctgttggcaaacaccacgttcccctgctcccagcccccttgcacgccctgctgctacgaaaaggaaccggaggaaaccctacgcatgcttgaggacaacgtcatgagacctgggtactatcagctgctacaagcatccttaacatgttctccccaccgccagcgacgcagcaccaaggacaacttcaatgtctataaagccacaagaccatacttagctcactgtcccgactgtggagaagggcactcgtgccatagtcccgtagcactagaacgcatcagaaatgaagcgacagacgggacgctgaaaatccaggtctccttgcaaatcggaataaagacggatgacagccacgattggaccaagctgcgttatatggacaaccacatgccagcagacgcagagagggcggggctatttgtaagaacatcagcaccgtgtacgattactggaacaatgggacacttcatcctggcccgatgtccaaaaggggaaactctgacggtgggattcactgacagtaggaagattagtcactcatgtacgcacccatttcaccacgaccctcctgtgataggtcgggaaaaattccattcccgaccgcagcacggtaaagagctaccttgcagcacgtacgtgcagagcaccgccgcaactaccgaggagatagaggtacacatgcccccagacacccctgatcgcacattaatgtcacaacagtccggcaacgtaaagatcacagtcaatggccagacggtgcggtacaagtgtaattgcggtggctcaaatgaaggactaacaactacagacaaagtgattaataactgcaaggttgatcaatgtcatgccgcggtcaccaatcacaaaaagtggcagtataactcccctctggtcccgcgtaatgctgaacttggggaccgaaaaggaaaaattcacatcccgtttccgctggcaaatgtaacatgcagggtgcctaaagcaaggaaccccaccgtgacgtacgggaaaaaccaagtcatcatgctactgtatcctgaccacccaacactcctgtcctaccggaatatgggagaagaaccaaactatcaagaagagtgggtgatgcataagaaggaagtcgtgctaaccgtgccgactgaagggctcgaggtcacgtggggcaacaacgagccgtataagtattggccgcagttatctacaaacggtacagcccatggccacccgcacgagataattctgtattattatgagctgtaccccactatgactgtagtagttgtgtcagtggccacgttcatactcctgtcgatggtgggtatggcagcggggatgtgcatgtgtgcacgacgcagatgcatcacaccgtatgaactgacaccaggagctaccgtccctttcctgcttagcctaatatgctgcatcagaacagctaaagcggccacataccaagaggctgcgatatacctgtggaacgagcagcaacctttgttttggctacaagcccttattccgctggcagccctgattgttctatgcaactgtctgagactcttaccatgctgctgtaaaacgttggcttttttagccgtaatgagcgtcggtgcccacactgtgagcgcgtacgaacacgtaacagtgatcccgaacacggtgggagtaccgtataagactctagtcaatagacctggctacagccccatggtattggagatggaactactgtcagtcactttggagccaacactatcgcttgattacatcacgtgcgagtacaaaaccgtcatcccgtctccgtacgtgaagtgctgcggtacagcagagtgcaaggacaaaaacctacctgactacagctgtaaggtcttcaccggcgtctacccatttatgtggggcggcgcctactgcttctgcgacgctgaaaacacgcagttgagcgaagcacacgtggagaagtccgaatcatgcaaaacagaatttgcatcagcatacagggctcataccgcatctgcatcagctaagctccgcgtcctttaccaaggaaataacatcactgtaactgcctatgcaaacggcgaccatgccgtcacagttaaggacgccaaattcattgtggggccaatgtcttcagcctggacacctttcgacaacaaaattgtggtgtacaaaggtgacgtctataacatggactacccgccctttggcgcaggaagaccaggacaatttggcgatatccaaagtcgcacacctgagagtaaagacgtctatgctaatacacaactggtactgcagagaccggctgtgggtacggtacacgtgccatactctcaggcaccatctggctttaagtattggctaaaagaacgcggggcgtcgctgcagcacacagcaccatttggctgccaaatagcaacaaacccggtaagagcggtgaactgcgccgtagggaacatgcccatctccatcgacataccggaagcggccttcactagggtcgtcgacgcgccctctttaacggacatgtcgtgcgaggtaccagcctgcacccattcctcagactttgggggcgtcgccattattaaatatgcagccagcaagaaaggcaagtgtgcggtgcattcgatgactaacgccgtcactattcgggaagctgagatagaagttgaagggaattctcagctgcaaatctctttctcgacggccttagccagcgccgaattccgcgtacaagtctgttctacacaagtacactgtgcagccgagtgccaccccccgaaggaccacatagtcaactacccggcgtcacataccaccctcggggtccaggacatctccgctacggcgatgtcatgggtgcagaagatcacgggaggtgtgggactggttgttgctgttgccgcactgattctaatcgtggtgctatgcgtgtcgttcagcaggcactaacttgacaattaagtatgaaggtatatgtgtcccctaagagacacactgtacatagcaaataatctatagatcaaagggctacgcaacccctgaatagtaacaaaatataaaatcactaaaaattataaaaacagaaaaatacataaataggtatacgtgtcccctaagagacacattgtatgtaggtgataagtatagatcaaagggccgaataacccctgaatagtaacaaaatatgaaaatcaataaaaatcataaaatagaaaaaccataaacagaagtagttcaaagggctataaaacccctgaatagtaacaaaacataaaattaataaaaatcaaatgaataccataattggcaaacggaagagatgtaggtacttaagcttcctaaaagcagccgaactcactttgagaagtaggcatagcataccgaactcttccacgattctccgaacccacagggacgtaggagatgttattttgtttttaatatttcaaaaaaaaaaaaaaaaaaaaaaaaaaaaaaaaaaaaaaaaa

SEQ ID NO: 36 - DNA, 4235 bp, Artificial Sequence
  Synthetic sequence
atggctgcgtgagacacacgtagcctaccagtttcttactgctctactctgcaaagcaagagattaataacccatcatggatcctgtgtacgtggacatagacgctgacagcgcctttttgaaggccctgcaacgtgcgtaccccatgtttgaggtggaaccaaggcaggtcacaccgaatgaccatgctaatgctagagcgttctcgcatctagctataaaactaatagagcaggaaattgaccccgactcaaccatcctggatatcggcagtgcgccagcaaggaggatgatgtcggacaggaagtaccactgcgtctgcccgatgcgcagtgcggaagatcccgagagactcgccaattatgcgagaaagctagcatctgccgcaggaaaagtcctggacagaaacatctctggaaagatcggggacttacaagcagtaatggccgtgccagacacggagacgccaacattctgcttacacacagacgtctcatgtagacagagagcagacgtcgctatataccaagacgtctatgctgtacacgcacccacgtcgctataccaccaggcgattaaaggggtccgagtggcgtactgggttgggttcgacacaaccccgttcatgtacaatgccatggcgggtgcctacccctcatactcgacaaactgggcagatgagcaggtactgaaggctaagaacataggattatgttcaacagacctgacggaaggtagacgaggcaagttgtctattatgagagggaaaaagctaaaaccgtgcgaccgtgtgctgttctcagtagggtcaacgctctacccggaaagccgcaagctacttaagagctggcacctgccatcggtgttccatttaaagggcaaactcagcttcacatgccgctgtgatacagtggtttcgtgtgagggctacgtcgttaagagaataacgatgagcccaggcctttatggaaaaaccacagggtatgcggtaacccaccacgcagacggattcctgatgtgcaagactaccgacacggttgacggcgaaagagtgtcattctcggtgtgcacatacgtgccggcgaccatttgtgatcaaatgaccggcatccttgctacagaagtcacgccggaggatgcacagaagctgttggtggggctgaaccagagaatagtggttaacggcagaacgcaacggaatacgaacaccatgaaaaattatctgcttcccgtggtcgcccaagccttcagtaagtgggcaaaggagtgccggaaagacatggaagatgaaaaactcctgggggtcagagaaagaacactgacctgctgctgtctatgggcattcaagaagcagaaaacacacacggtctacaagagacctgatacccagtcaattcagaaggttcaggccgagtttgacagctttgtggtaccgagtctgtggtcgtccgggttgtcaatccctttgaggactagaatcaaatggttgttaagcaaggtgccaaaaaccgacctgatcccatacagcggagacgcccgagaagcccgggacgcagaaaaagaagcagaggaagaacgagaagcagaactgactcgcgaagccctaccacctctacaggcagcacaggaagatgttcaggtcgaaatcgacgtggaacagcttgaggacagagcgggcgcaggaataatagagactccgagaggagctatcaaagttactgcccaaccaacagaccacgtcgtgggagagtacctggtactctccccgcagaccgtactacgtagccagaagctcagtctgattcacgctttggcggagcaagtgaagacgtgcacgcacaacggacgagcagggaggtatgcggtcgaagcgtacgacggccgagtcctagtgccctcaggctatgcaatctcgcctgaagacttccagagtctaagcgaaagcgcaacgatggtgtataacgaaagagagttcgtaaacagaaagctacaccatattgcgatgcacggaccagccctgaacaccgacgaagagtcgtatgagctggtgagggcagagaggacagaacacgagtacgtctacgacgtggatcagagaagatgctgtaagaaggaagaagccgcaggactggtactggtgggcgacttgactaatccgccctaccacgaattcgcatatgaagggctaaaaatccgccctgcctgcccatacaaaattgcagtcataggagtcttcggagtaccgggatctggcaagtcagctattatcaagaacctagttaccaggcaggacctggtgactagcggaaagaaagaaaactgccaagaaatcaccaccgacgtgatgagacagagaggtctagagatatctgcacgtacggttgactcgctgctcttgaatggatgcaacagaccagtcgacgtgttgtacgtagacgaggcgtttgcgtgccactctggaacgctacttgctttgatcgccttggtgagaccaaggcagaaagttgtactttgtggtgacccgaagcagtgcggcttcttcaatatgatgcagatgaaagtcaactataatcacaacatctgcacccaagtgtaccacaaaagtatctccaggcggtgtacactgcctgtgaccgccattgtgtcatcgttgcattacgaaggcaaaatgcgcactacgaatgagtacaacaagccgattgtagtggacactacaggctcaacaaaacctgaccctggagacctcgtgttaacgtgcttcagagggtgggttaaacaactgcaaattgactatcgtggatacgaggtcatgacagcagccgcatcccaagggttaaccagaaaaggagtttacgcagttagacaaaaagttaatgaaaacccgctctatgcatcaacgtcagagcacgtcaacgtactcctaacgcgtacggaaggtaaactggtatggaagacactttccggcgacccgtggataaagacgctgcagaacccaccgaaaggaaacttcaaagcaactattaaggagtgggaggtggagcatgcatcaataatggcgggcatctgcagtcaccaaatgaccttcgatacattccaaaataaagccaacgtttgttgggctaagagcttggtccctatcctcgaaacagcggggataaaactaaatgataggcagtggtctcagataattcaagccttcaaagaagacaaagcatactcacctgaagtagccctgaatgaaatatgtacgcgcatgtatggggtggatctagacagcgggctattttctaaaccgttggtgtctgtgtattacgcggataaccactgggataataggcctggagggaaaatgttcggatttaaccccgaggcagcatccattctagaaagaaagtatccattcacaaaagggaagtggaacatcaacaagcagatctgcgtgactaccaggaggatagaagactttaaccctaccaccaacatcataccggccaacaggagactaccacactcattagtggccgaacaccgcccagtaaaaggggaaagaatggaatggctggttaacaagataaacggccaccacgtgctcctggtcagtggctataaccttgcactgcctactaagagagtcacttgggtagcgccgttaggtgtccgtggagcggactacacatacaacctagagttgggtctgccagcaacgcttggtaggtatgacctagtggtcataaacatccacacaccttttcgcatacaccattaccaacagtgcgtcgaccacgcaatgaaactgcaaatgctcgggggtgactcattgagactgctcaaaccgggcggctctctattgatcagagcatatggttacgcagatagaaccagtgaacgagttagatcaaagggccgaataacccctgaatagtaacaaaatatgaaaatcaataaaaatcataaaatagaaaaaccataaacagaagtagttcaaagggctataaaacccctgaatagtaacaaaacataaaattaataaaaatcaaatgaataccataattggcaaacggaagagatgtaggtacttaagcttcctaaaagcagccgaactcactttgagaagtaggcatagcataccgaactcttccacgattctccgaacccacagggacgtaggagatgttattttgtttttaatatttcaaaaaaaaaaaaaaaaaaaaaaaaaaaaaaaaaaaaaaaaa

SEQ ID NO: 37 - DNA, 4032 bp, Artificial Sequence
  Synthetic sequence
atggctgcgtgagacacacgtagcctaccagtttcttactgctctactctgcaaagcaagagattaataacccatcatggatcctgtgtacgtggacatagacgctgacagcgcctttttgaaggccctgcaacgtgcgtaccccatgtttgaggtggaaccaaggcaggtcacaccgaatgaccatgctaatgctagagcgttctcgcatctagctataaaactaatagagcaggaaattgaccccgactcaaccatcctggatatcggcagtgcgccagcaaggaggatgatgtcggacaggaagtaccactgcgtctgcccgatgcgcagtgcggaagatcccgagagactcgccaattatgcgagaaagctagcatctgccgcaggaaaagtcctggacagaaacatctctggaaagatcggggacttacaagcagtaatggccgtgccagacacggagacgccaacattctgcttacacacagacgtctcatgtagacagagagcagacgtcgctatataccaagacgtctatgctgtacacgcacccacgtcgctataccaccaggcgattaaaggggtccgagtggcgtactgggttgggttcgacacaaccccgttcatgtacaatgccatggcgggtgcctacccctcatactcgacaaactgggcagatgagcaggtactgaaggctaagaacataggattatgttcaacagacctgacggaaggtagacgaggcaagttgtctattatgagagggaaaaagctaaaaccgtgcgaccgtgtgctgttctcagtagggtcaacgctctacccggaaagccgcaagctacttaagagctggcacctgccatcggtgttccatttaaagggcaaactcagcttcacatgccgctgtgatacagtggtttcgtgtgagggctacgtcgttaagagaataacgatgagcccaggcctttatggaaaaaccacagggtatgcggtaacccaccacgcagacggattcctgatgtgcaagactaccgacacggttgacggcgaaagagtgtcattctcggtgtgcacatacgtgccggcgaccatttgtgatcaaatgaccggcatccttgctacagaagtcacgccggaggatgcacagaagctgttggtggggctgaaccagagaatagtggttaacggcagaacgcaacggaatacgaacaccatgaaaaattatctgcttcccgtggtcgcccaagccttcagtaagtgggcaaaggagtgccggaaagacatggaagatgaaaaactcctgggggtcagagaaagaacactgacctgctgctgtctatgggcattcaagaagcagaaaacacacacggtctacaagagacctgatacccagtcaattcagaaggttcaggccgagtttgacagctttgtggtaccgagtctgtggtcgtccgggttgtcaatccctttgaggactagaatcaaatggttgttaagcaaggtgccaaaaaccgacctgatcccatacagcggagacgcccgagaagcccgggacgcagaaaaagaagcagaggaagaacgagaagcagaactgactcgcgaagccctaccacctctacaggcagcacaggaagatgttcaggtcgaaatcgacgtggaacagcttgaggacagagcgggcgcaggaataatagagactccgagaggagctatcaaagttactgcccaaccaacagaccacgtcgtgggagagtacctggtactctccccgcagaccgtactacgtagccagaagctcagtctgattcacgctttggcggagcaagtgaagacgtgcacgcacaacggacgagcagggaggtatgcggtcgaagcgtacgacggccgagtcctagtgccctcaggctatgcaatctcgcctgaagacttccagagtctaagcgaaagcgcaacgatggtgtataacgaaagagagttcgtaaacagaaagctacaccatattgcgatgcacggaccagccctgaacaccgacgaagagtcgtatgagctggtgagggcagagaggacagaacacgagtacgtctacgacgtggatcagagaagatgctgtaagaaggaagaagccgcaggactggtactggtgggcgacttgactaatccgccctaccacgaattcgcatatgaagggctaaaaatccgccctgcctgcccatacaaaattgcagtcataggagtcttcggagtaccgggatctggcaagtcagctattatcaagaacctagttaccaggcaggacctggtgactagcggaaagaaagaaaactgccaagaaatcaccaccgacgtgatgagacagagaggtctagagatatctgcacgtacggttgactcgctgctcttgaatggatgcaacagaccagtcgacgtgttgtacgtagacgaggcgtttgcgtgccactctggaacgctacttgctttgatcgccttggtgagaccaaggcagaaagttgtactttgtggtgacccgaagcagtgcggcttcttcaatatgatgcagatgaaagtcaactataatcacaacatctgcacccaagtgtaccacaaaagtatctccaggcggtgtacactgcctgtgaccgccattgtgtcatcgttgcattacgaaggcaaaatgcgcactacgaatgagtacaacaagccgattgtagtggacactacaggctcaacaaaacctgaccctggagacctcgtgttaacgtgcttcagagggtgggttaaacaactgcaaattgactatcgtggatacgaggtcatgacagcagccgcatcccaagggttaaccagaaaaggagtttacgcagttagacaaaaagttaatgaaaacccgctctatgcatcaacgtcagagcacgtcaacgtactcctaacgcgtacggaaggtaaactggtatggaagacactttccggcgacccgtggataaagacgctgcagaacccaccgaaaggaaacttcaaagcaactattaaggagtgggaggtggagcatgcatcaataatggcgggcatctgcagtcaccaaatgaccttcgatacattccaaaataaagccaacgtttgttgggctaagagcttggtccctatcctcgaaacagcggggataaaactaaatgataggcagtggtctcagataattcaagccttcaaagaagacaaagcatactcacctgaagtagccctgaatgaaatatgtacgcgcatgtatggggtggatctagacagcgggctattttctaaaccgttggtgtctgtgtattacgcggataaccactgggataataggcctggagggaaaatgttcggatttaaccccgaggcagcatccattctagaaagaaagtatccattcacaaaagggaagtggaacatcaacaagcagatctgcgtgactaccaggaggatagaagactttaaccctaccaccaacatcataccggccaacaggagactaccacactcattagtggccgaacaccgcccagtaaaaggggaaagaatggaatggctggttaacaagataaacggccaccacgtgctcctggtcagtggctataaccttgcactgcctactaagagagtcacttgggtagcgccgttaggtgtccgtggagcggactacacatacaacctagagttgggtctgccagcaacgcttggtaggtatgacctagtggtcataaacatccacacaccttttcgcatacaccattaccaacagtgcgtcgaccacgcaatgaaactgcaaatgctcgggggtgactcattgagactgctcaaaccgggcggctctctattggcaaacggaagagatgtaggtacttaagcttcctaaaagcagccgaactcactttgagaagtaggcatagcataccgaactcttccacgattctccgaacccacagggacgtaggagatgttattttgtttttaatatttcaaaaaaaaaaaaaaaaaaaaaaaaaaaaaaaaaaaaaaaaa

SEQ ID NO: 38 - DNA, 8753 bp, Artificial Sequence
  Synthetic sequence
atggctgcgtgagacacacgtagcctaccagtttcttactgctctactctgcaaagcaagagattaataacccatcatggatcctgtgtacgtggacatagacgctgacagcgcctttttgaaggccctgcaacgtgcgtaccccatgtttgaggtggaaccaaggcaggtcacaccgaatgaccatgctaatgctagagcgttctcgcatctagctataaaactaatagagcaggaaattgaccccgactcaaccatcctggatatcggcagtgcgccagcaaggaggatgatgtcggacaggaagtaccactgcgtctgcccgatgcgcagtgcggaagatcccgagagactcgccaattatgcgagaaagctagcatctgccgcaggaaaagtcctggacagaaacatctctggaaagatcggggacttacaagcagtaatggccgtgccagacacggagacgccaacattctgcttacacacagacgtctcatgtagacagagagcagacgtcgctatataccaagacgtctatgctgtacacgcacccacgtcgctataccaccaggcgattaaaggggtccgagtggcgtactgggttgggttcgacacaaccccgttcatgtacaatgccatggcgggtgcctacccctcatactcgacaaactgggcagatgagcaggtactgaaggctaagaacataggattatgttcaacagacctgacggaaggtagacgaggcaagttgtctattatgagagggaaaaagctaaaaccgtgcgaccgtgtgctgttctcagtagggtcaacgctctacccggaaagccgcaagctacttaagagctggcacctgccatcggtgttccatttaaagggcaaactcagcttcacatgccgctgtgatacagtggtttcgtgtgagggctacgtcgttaagagaataacgatgagcccaggcctttatggaaaaaccacagggtatgcggtaacccaccacgcagacggattcctgatgtgcaagactaccgacacggttgacggcgaaagagtgtcattctcggtgtgcacatacgtgccggcgaccatttgtgatcaaatgaccggcatccttgctacagaagtcacgccggaggatgcacagaagctgttggtggggctgaaccagagaatagtggttaacggcagaacgcaacggaatacgaacaccatgaaaaattatctgcttcccgtggtcgcccaagccttcagtaagtgggcaaaggagtgccggaaagacatggaagatgaaaaactcctgggggtcagagaaagaacactgacctgctgctgtctatgggcattcaagaagcagaaaacacacacggtctacaagagacctgatacccagtcaattcagaaggttcaggccgagtttgacagctttgtggtaccgagtctgtggtcgtccgggttgtcaatccctttgaggactagaatcaaatggttgttaagcaaggtgccaaaaaccgacctgatcccatacagcggagacgcccgagaagcccgggacgcagaaaaagaagcagaggaagaacgagaagcagaactgactcgcgaagccctaccacctctacaggcagcacaggaagatgttcaggtcgaaatcgacgtggaacagcttgaggacagagcgggcgcaggaataatagagactccgagaggagctatcaaagttactgcccaaccaacagaccacgtcgtgggagagtacctggtactctccccgcagaccgtactacgtagccagaagctcagtctgattcacgctttggcggagcaagtgaagacgtgcacgcacaacggacgagcagggaggtatgcggtcgaagcgtacgacggccgagtcctagtgccctcaggctatgcaatctcgcctgaagacttccagagtctaagcgaaagcgcaacgatggtgtataacgaaagagagttcgtaaacagaaagctacaccatattgcgatgcacggaccagccctgaacaccgacgaagagtcgtatgagctggtgagggcagagaggacagaacacgagtacgtctacgacgtggatcagagaagatgctgtaagaaggaagaagccgcaggactggtactggtgggcgacttgactaatccgccctaccacgaattcgcatatgaagggctaaaaatccgccctgcctgcccatacaaaattgcagtcataggagtcttcggagtaccgggatctggcaagtcagctattatcaagaacctagttaccaggcaggacctggtgactagcggaaagaaagaaaactgccaagaaatcaccaccgacgtgatgagacagagaggtctagagatatctgcacgtacggttgactcgctgctcttgaatggatgcaacagaccagtcgacgtgttgtacgtagacgaggcgtttgcgtgccactctggaacgctacttgctttgatcgccttggtgagaccaaggcagaaagttgtactttgtggtgacccgaagcagtgcggcttcttcaatatgatgcagatgaaagtcaactataatcacaacatctgcacccaagtgtaccacaaaagtatctccaggcggtgtacactgcctgtgaccgccattgtgtcatcgttgcattacgaaggcaaaatgcgcactacgaatgagtacaacaagccgattgtagtggacactacaggctcaacaaaacctgaccctggagacctcgtgttaacgtgcttcagagggtgggttaaacaactgcaaattgactatcgtggatacgaggtcatgacagcagccgcatcccaagggttaaccagaaaaggagtttacgcagttagacaaaaagttaatgaaaacccgctctatgcatcaacgtcagagcacgtcaacgtactcctaacgcgtacggaaggtaaactggtatggaagacactttccggcgacccgtggataaagacgctgcagaacccaccgaaaggaaacttcaaagcaactattaaggagtgggaggtggagcatgcatcaataatggcgggcatctgcagtcaccaaatgaccttcgatacattccaaaataaagccaacgtttgttgggctaagagcttggtccctatcctcgaaacagcggggataaaactaaatgataggcagtggtctcagataattcaagccttcaaagaagacaaagcatactcacctgaagtagccctgaatgaaatatgtacgcgcatgtatggggtggatctagacagcgggctattttctaaaccgttggtgtctgtgtattacgcggataaccactgggataataggcctggagggaaaatgttcggatttaaccccgaggcagcatccattctagaaagaaagtatccattcacaaaagggaagtggaacatcaacaagcagatctgcgtgactaccaggaggatagaagactttaaccctaccaccaacatcataccggccaacaggagactaccacactcattagtggccgaacaccgcccagtaaaaggggaaagaatggaatggctggttaacaagataaacggccaccacgtgctcctggtcagtggctataaccttgcactgcctactaagagagtcacttgggtagcgccgttaggtgtccgtggagcggactacacatacaacctagagttgggtctgccagcaacgcttggtaggtatgacctagtggtcataaacatccacacaccttttcgcatacaccattaccaacagtgcgtcgaccacgcaatgaaactgcaaatgctcgggggtgactcattgagactgctcaaaccgggcggctctctattgatcagagcatatggttacgcagatagaaccagtgaacgagtcatctgcgtattgggacgcaagtttagatcgtctagagcgttgaaaccaccatgtgtcaccagcaacactgagatgtttttcctattcagcaactttgacaatggcagaaggaatttcacaactcatgtcatgaacaatcaactgaatgcagccttcgtaggacaggtcacccgagcaggatgtgcaccgtcgtaccgggtaaaacgcatggacatcgcgaagaacgatgaagagtgcgtagtcaacgccgctaaccctcgcgggttaccgggtgacggtgtttgcaaggcagtatacaaaaaatggccggagtcctttaagaacagtgcaacaccagtgggaaccgcaaaaacagttatgtgcggtacgtatccagtaatccacgctgttggaccaaacttctctaattattcggagtctgaaggggaccgggaattggcagctgcctatcgagaagtcgcaaaggaagtaactaggctgggagtaaatagtgtagctatacctctcctctccacaggtgtatactcaggagggaaagacaggctgacccagtcactgaaccacctctttacagccatggactcgacggatgcagacgtggtcatctactgccgcgacaaagaatgggagaagaaaatatctgaggccatacagatgcggacccaagtagagctgctggatgagcacatctccatagactgcgatattgttcgcgtgcaccctgacagcagcttggcaggcagaaaaggatacagcaccacggaaggcgcactgtactcatatctagaagggacccgttttcatcagacggctgtggatatggcggagatacatactatgtggccaaagcaaacagaggccaatgagcaagtctgcctatatgccctgggggaaagtattgaatcgatcaggcagaaatgcccggtggatgatgcagacgcatcatctccccccaaaactgtcccgtgcctttgccgttacgctatgactccagaacgcgtcacccggcttcgcatgaaccacgtcacaagcataattgtgtgttcttcgtttcccctcccaaagtacaaaatagaaggagtgcaaaaagtcaaatgctctaaggtaatgctatttgaccacaacgtgccatcgcgcgtaagtccaagggaatatagatcttcccaggagtctgcacaggaggcgagtacaatcacgtcactgacgcatagtcaattcgacctaagcgttgatggcgagatactgcccgtcccgtcagacctggatgctgacgccccagccctagaaccagcactagacgacggggcgacacacacgctgccatccacaaccggaaaccttgcggccgtgtctgattgggtaatgagcaccgtacctgtcgcgccgcccagaagaaggcgagggagaaacctgactgtgacatgtgacgagagagaagggaatataacacccatggctagcgtccgattctttagggcagagctgtgtccggtcgtacaagaaacagcggagacgcgtgacacagcaatgtctcttcaggcaccaccgagtaccgccacggaaccgaatcatccgccgatctccttcggagcatcaagcgagacgttccccattacatttggggacttcaacgaaggagaaatcgaaagcttgtcttctgagctactaactttcggagacttcttaccaggagaagtggatgacttgacagacagcgactggtccacgtgctcagacacggacgacgagttatgactagacagggcaggtgggtatatattctcgtcggacaccggtccaggtcatttacaacagaagtcagtacgccagtcagtgctgccggtgaacaccctggaggaagtccacgaggagaagtgttacccacctaagctggatgaagcaaaggagcaactattacttaagaaactccaggagagtgcatccatggccaacagaagcaggtatcagtcgcgcaaagtagaaaacatgaaagcagcaatcatccagagactaaagagaggctgtagactatacttaatgtcagagaccccaaaagtccctacttaccggactacatatccggcgcctgtgtactcgcctccgatcaacgtccgattgtccaatcccgagtccgcagtggcagcatgcaatgagttcttagctagaaactatccaactgtctcatcataccaaattaccgacgagtatgatgcatatctagacatggtggacgggtcggagagttgcctggaccgagcgacattcaatccgtcaaaactcaggagctacccgaaacagcacgcttaccacgcgccctccatcagaagcgctgtaccgtccccattccagaacacactacagaatgtactggcagcagccacgaaaagaaactgcaacgtcacacagatgagggaattacccactttggactcagcagtattcaacgtggagtgtttcaaaaaattcgcatgcaaccaagaatactgggaagaatttgctgccagccctattaggataacaactgagaatttagcaacctatgttactaaactaaaagggccaaaagcagcagcgctattcgcaaaaacccataatctactgccactacaggaagtaccaatggataggttcacagtagatatgaaaagggacgtaaaggtgactcctggtacaaagcatacagaggaaagacctaaggtgcaggttatacaggcggctgaacccttggcgacagcatacctatgtgggattcacagagagctggttaggaggctgaacgccgtcctcctacccaatgtacatacactatttgacatgtctgccgaggatttcgatgccatcatagccgcacactttaagccaggagacactgttttggaaacggacatagcctcctttgataagagccaagatgattcacttgcgcttactgctttgatgctgttagaggatttaggggtggatcactccctgctggacttgatagaggctgctttcggagagatttccagctgtcacctaccgacaggtacgcgcttcaagttcggcgccatgatgaaatcaggtatgttcctaactctgttcgtcaacacattgttaaacatcaccatcgccagccgagtgctggaagatcgtctgacaaaatccgcgtgcgcggccttcatcggcgacgacaacataatacatggagtcgtctccgatgaattgatggcagccagatgtgccacttggatgaacatggaagtgaagatcatagatgcagttgtatccttgaaagccccttacttttgtggagggtttatactgcacgatactgtgacaggaacagcttgcagagtggcagacccgctaaaaaggctttttaaactgggcaaaccgctagcggcaggtgacgaacaagatgaagatagaagacgagcgctggctgacgaagtgatcagatggcaacgaacagggctaattgatgagctggagaaagcggtatactctaggtacgaagtgcagggtatatcagttgtggtaatgtccatggccacctttgcaagctccagatccaacttcgagaagctcagaggacccgtcataactttgtacggcggtcctaaataggtacgcactacagctacctattttgcagaagccgacagcaagtatctaaacactaatcagctacaatggagttcatcccaacccaaactttttacaataggaggtaccagcctcgaccctggactccgcgccctactatccaagtcatcaggcccagaccgcgccctcagaggcaagctgggcaacttgcccagctgatctcagcagttaataaactgacaatgcgcgcggtaccccaacagaagccacgcaggaatcggaagaataagaagcaaaagcaaaaacaacaggcgccacaaaacaacacaaatcaaaagaagcagccacctaaaaagaaaccggctcaaaagaaaaagaagccgggccgcagagagaggatgtgcatgaaaatcgaaaatgattgtattttcgaagtcaagcacgaaggtaaggtaacaggttacgcgtgcctggtgggggacaaagtaatgaaaccagcacacgtaaaggggaccatcgataacgcggacctggccaaactggcctttaagcggtcatctaagtatgaccttgaatgcgcgcagatacccgtgcacatgaagtccgacgcttcgaagttcacccatgagaaaccggaggggtactacaactggcaccacggagcagtacagtactcaggaggccggttcaccatccctacaggtgctggcaaaccaggggacagcggcagaccgatcttcgacaacaagggacgcgtggtggccatagtcttaggaggagctaatgaaggagcccgtacagccctctcggtggtgacctggaataaagacattgtcactaaaatcacccccgagggggccgaagagtggagtcttgccatcccagttatgtgcctgttggcaaacaccacgttcccctgctcccagcccccttgcacgccctgctgctacgaaaaggaaccggaggaaaccctacgcatgcttgaggacaacgtcatgagacctgggtactatcgtagttcaaagggctataaaacccctgaatagtaacaaaacataaaattaataaaaatcaaatgaataccataattggcaaacggaagagatgtaggtacttaagcttcctaaaagcagccgaactcactttgagaagtaggcatagcataccgaactcttccacgattctccgaacccacagggacgtaggagatgttattttgtttttaatatttcaaaaaaaaaaaaaaaaaaaaaaaaaaaaaaaaaaaaaaaaa

SEQ ID NO: 39 - DNA, 3912 bp, Artificial Sequence
  Synthetic sequence
atggctgcgtgagacacacgtagcctaccagtttcttactgctctactctgcaaagcaagagattaataacccatcatggatcctgtgtacgtggacatagacgctgacagcgcctttttgaaggccctgcaacgtgcgtaccccatgtttgaggtggaaccaaggcaggtcacaccgaatgaccatgctaatgctagagcgttctcgcatctagctataaaactaatagagcaggaaattgaccccgactcaaccatcctggatatcggcagtgcgccagcaaggaggatgatgtcggacaggaagtaccactgcgtctgcccgatgcgcagtgcggaagatcccgagagactcgccaattatgcgagaaagctagcatctgccgcaggaaaagtcctggacagaaacatctctggaaagatcggggacttacaagcagtaatggccgtgccagacacggagacgccaacattctgcttacacacagacgtctcatgtagacagagagcagacgtcgctatataccaagacgtctatgctgtacacgcacccacgtcgctataccaccaggcgattaaaggggtccgagtggcgtactgggttgggttcgacacaaccccgttcatgtacaatgccatggcgggtgcctacccctcatactcgacaaactgggcagatgagcaggtactgaaggctaagaacataggattatgttcaacagacctgacggaaggtagacgaggcaagttgtctattatgagagggaaaaagctaaaaccgtgcgaccgtgtgctgttctcagtagggtcaacgctctacccggaaagccgcaagctacttaagagctggcacctgccatcggtgttccatttaaagggcaaactcagcttcacatgccgctgtgatacagtggtttcgtgtgagggctacgtcgttaagagaataacgatgagcccaggcctttatggaaaaaccacagggtatgcggtaacccaccacgcagacggattcctgatgtgcaagactaccgacacggttgacggcgaaagagtgtcattctcggtgtgcacatacgtgccggcgaccatttgtgatcaaatgaccggcatccttgctacagaagtcacgccggaggatgcacagaagctgttggtggggctgaaccagagaatagtggttaacggcagaacgcaacggaatacgaacaccatgaaaaattatctgcttcccgtggtcgcccaagccttcagtaagtgggcaaaggagtgccggaaagacatggaagatgaaaaactcctgggggtcagagaaagaacactgacctgctgctgtctatgggcattcaagaagcagaaaacacacacggtctacaagagacctgatacccagtcaattcagaaggttcaggccgagtttgacagctttgtggtaccgagtctgtggtcgtccgggttgtcaatccctttgaggactagaatcaaatggttgttaagcaaggtgccaaaaaccgacctgatcccatacagcggagacgcccgagaagcccgggacgcagaaaaagaagcagaggaagaacgagaagcagaactgactcgcgaagccctaccacctctacaggcagcacaggaagatgttcaggtcgaaatcgacgtggaacagcttgaggacagagcgggcgcaggaataatagagactccgagaggagctatcaaagttactgcccaaccaacagaccacgtcgtgggagagtacctggtactctccccgcagaccgtactacgtagccagaagctcagtctgattcacgctttggcggagcaagtgaagacgtgcacgcacaacggacgagcagggaggtatgcggtcgaagcgtacgacggccgagtcctagtgccctcaggctatgcaatctcgcctgaagacttccagagtctaagcgaaagcgcaacgatggtgtataacgaaagagagttcgtaaacagaaagctacaccatattgcgatgcacggaccagccctgaacaccgacgaagagtcgtatgagctggtgagggcagagaggacagaacacgagtacgtctacgacgtggatcagagaagatgctgtaagaaggaagaagccgcaggactggtactggtgggcgacttgactaatccgccctaccacgaattcgcatatgaagggctaaaaatccgccctgcctgcccatacaaaattgcagtcataggagtcttcggagtaccgggatctggcaagtcagctattatcaagaacctagttaccaggcaggacctggtgactagcggaaagaaagaaaactgccaagaaatcaccaccgacgtgatgagacagagaggtctagagatatctgcacgtacggttgactcgctgctcttgaatggatgcaacagaccagtcgacgtgttgtacgtagacgaggcgtttgcgtgccactctggaacgctacttgctttgatcgccttggtgagaccaaggcagaaagttgtactttgtggtgacccgaagcagtgcggcttcttcaatatgatgcagatgaaagtcaactataatcacaacatctgcacccaagtgtaccacaaaagtatctccaggcggtgtacactgcctgtgaccgccattgtgtcatcgttgcattacgaaggcaaaatgcgcactacgaatgagtacaacaagccgattgtagtggacactacaggctcaacaaaacctgaccctggagacctcgtgttaacgtgcttcagagggtgggttaaacaactgcaaattgactatcgtggatacgaggtcatgacagcagccgcatcccaagggttaaccagaaaaggagtttacgcagttagacaaaaagttaatgaaaacccgctctatgcatcaacgtcagagcacgtcaacgtactcctaacgcgtacggaaggtaaactggtatggaagacactttccggcgacccgtggataaagacgctgcagaacccaccgaaaggaaacttcaaagcaactattaaggagtgggaggtggagcatgcatcaataatggcgggcatctgcagtcaccaaatgaccttcgatacattccaaaataaagccaacgtttgttgggctaagagcttggtccctatcctcgaaacagcggggataaaactaaatgataggcagtggtctcagataattcaagccttcaaagaagacaaagcatactcacctgaagtagccctgaatgaaatatgtacgcgcatgtatggggtggatctagacagcgggctattttctaaaccgttggtgtctgtgtattacgcggataaccactgggataataggcctggagggaaaatgttcggatttaaccccgaggcagcatccattctagaaagaaagtatccattcacaaaagggaagtggaacatcaacaagcagatctgcgtgactaccaggaggatagaagactttaaccctaccaccaacatcataccggccaacaggagactaccacactcattagtggccgaacaccgcccagtaaaaggggaaagaatggaatggctggttaacaagatcaaagggccgaataacccctgaatagtaacaaaatatgaaaatcaataaaaatcataaaatagaaaaaccataaacagaagtagttcaaagggctataaaacccctgaatagtaacaaaacataaaattaataaaaatcaaatgaataccataattggcaaacggaagagatgtaggtacttaagcttcctaaaagcagccgaactcactttgagaagtaggcatagcataccgaactcttccacgattctccgaacccacagggacgtaggagatgttattttgtttttaatatttcaaaaaaaaaaaaaaaaaaaaaaaaaaaaaaaaaaaaaaaaa

SEQ ID NO: 40 - DNA, 9541 bp, Artificial Sequence
  Synthetic sequence
atggctgcgtgagacacacgtagcctaccagtttcttactgctctactctgcaaagcaagagattaataacccatcatggattctgtgtacgtggatatagacgctgacagcgcctttttgaaggccctgcaacgtgcgtaccccatgtttgaggtggaacctaggcaggtcacatcaaatgaccatgctaatgctagagcgttctcgcatctagccataaaactaatagagcaggaaattgatcccgactcaaccatcctggatataggtagtgcgccagcaaggaggatgatgtcggacaggaagtaccactgcgtttgcccgatgcgcagcgcagaagatcccgagagactcgctaattatgcgagaaagctcgcatctgccgcaggaaaagtcctggacagaaacatttctggaaagatcggggacttacgagcttggtccctatcctcgaaacagcggggataaaactaaatgataggcagtggtcccagataattcaagctttcaaagaagacaaagcatactcacccgaagtagccctgaatgaaatatgcacgcgcatgtatggggtggatctagacagcgggctattctctaaaccgttggtatctgtgtattacgcggataaccactgggataataggccgggaggaaagatgttcggattcaaccctgaggcagcgtccattctagaaagaaagtacccgtttacaaaaggaaagtggaacatcaacaagcagatctgcgtgactaccaggaggatagaagacttcaaccctaccaccaacattataccggccaacaggagactaccacactcattagtggccgaacaccgcccagtaaaaggggaaagaatggaatggctggttaacaagataaacggacatcatgtgctcctggttagcggctataaccttgcactgcctactaagagagtcacctgggtagcgccactaggtgtccgcggagcggactatacatacaacctagagctgggtctaccggcaacacttggtaggtatgacctagtggtcataaacatccacacaccttttcgcatacaccattaccaacagtgcgtagatcacgcaatgaaactgcaaatgctaggaggtgactcactgagactgctcaaaccgggtggctctctattgatcagagcatacggttacgcagatagaaccagtgaacgagtaatctgcgtactgggacgtaagtttagatcgtccagagcattgaaaccaccatgtatcaccagtaatactgagatgttcttcctatttagcagttttgacaatggcagaaggaattttacaacgcatgttatgaacaatcaactgaacgcagcctttgtaggacaggccacccgagcaggatgtgcaccatcgtaccgggtaaagcgcatggacatcgcgaagaacgatgaagagtgcgtggtcaacgccgccaaccctcgcgggttaccgggtgacggtgtttgcaaggcagtatataaaaaatggccggagtcctttaaaaatagtgcaacaccagtaggaaccgcaaaaacagttatgtgcggtacatatccagtaatccatgccgtaggaccaaacttctcaaattacacggagtccgaaggggaccgggaattggcggctgcctatcgagaagtcgcaaaggaagtaactagactgggagtaaatagcgtagctatacctctcctctccacaggtgtatactcaggagggaaagacaggctaacccagtcactgaaccacctctttacagccatggactcgacggatgcagacgtggtcatctactgccgagacaaggaatgggagaagaaaatatctgaggccatacagatgcggacccaagtggagctgctggatgagcacatctccatagactgcgatgtcattcgcgtgcaccctgacagtagtttggcaggtagaaaaggatacagcaccacggaaggcgcactgtattcatatctagaagggacacgttttcaccagacggcagtggatgtggcagagatacatactatgtggccaaagcaaatagaggccaatgagcaagtctgcctatatgccctgggggaaagtattgagtcaatcaggcagaaatgcccggtggatgatgcagatgcatcatctcccccgaaaaccgtcccgtgcctttgccgttatgccatgactcctgaacgcgtcacccgacttcgcatgaaccatgtcacaaatataattgtgtgttcttcatttccccttccaaagtacaagatagaaggagtgcaaaaagtcaaatgctccaaggtaatgttatttgatcacaatgtgccatcgcgcgtaagtccaagggaatacagatcttcccaggagtctgtacgggaagtgagtatgacaacgtcattgacgcatagtcagtttgatctaagcgccgatggcgagacactgcccgtcccgtcagacctggatgctgacgccccagccctagaaccggccctagacgacggggcgatacatacgaccggaaaccttgcggccgtgtctgactgggtaatgagcaccgtacccgtcgcgccgcctagaagaaggagagggagaaacctgaccgtgatatgtgacgagagagaagggaatataacacccatggctagcgtccgattctttagagcagagcagtgtccgaccgtacaagaaacagcggagacgcgtgacacagctatttcctttcgggcaccgccaagtatcaccgtggaactgagccatccaccgatctccttcggagcaccaagcgagacgttccccatcacatttggggacttcaacgatggagaaatcgaaagcttgtcttctgagctactaactttcggagacttcctacccggtgaagtggatgatttgacagatagcgactggtccacgtgctcagacacggacgacgagttatgactagacagggcaggtgggtatatattctcgtcggacaccggtccaggccatttacaacagaagtcggtacgccagtcagtgctgccggtaaacaccctggaggaagttcacgaggagaagtgttacccacctaagctggatgaattaaaggagcaactactacttaagaaactccaggagagtgcgtccacggccaatagaagcaggtatcaatcacgcaaagtggaaaatatgaaagcaacaatcatccagagactaaagagaggctgtaaactgtatttaatggcagagaccccgaaagtcccgacttatcggaccgtatacccggcgcctgtgtactcgcctccgatcaacgtccgattgtccaatcccgagtccgcagtggcagcatgtaatgagttcttagctagaaactacccaactgtttcatcataccaaatcaccgatgagtatgatgcatatctagacatggtggacgggtcggagagttgcttggaccgagcgacattcaatccgtcaaaacttaggagctacccgaaacaacatgcttatcacgcgccctctatcagaagcgctgtaccttccccattccagaacacactacagaatgtactggcagcagccacgaaaaggaactgcaacgtcacacagatgagggaattacccactttggactcagcagtattcaacgtggagtgttttaaaaaattcgcatgcaaccgagaatactgggaagaatttgctgccagccctatcaggataacgactgagaatctaacaacctatgtcactaaattaaaggggccaaaagcagcagcgttgcttgcaagaacccataatctgctgccgctgcaggatgtaccaatggataggttcacagtagatatgaaaagggacgtgaaggtaactcctggcacaaagcatacagaggaaaggcctaaggtgcaggttatacaggcggctgaacccttggcaacagcgtacctatgtggaattcacagagaattggttaggagattgaacgccgtcctcctacccaacgtgcatacactatttgacatgtctgccgaggacttcgatgccattatagccgcacactttaagccaggagacgccgttttagaaacggacatagcctcctttgataagagccaggatgattcacttgcgcttaccgccttaatgctgttagaagatttgggagtggatcactccttgttggacctgatagaggctgcttttggagagatttccagctgtcacctgccgacaggtacgcgcttcaagttcggcgctatgatgaaatccggtatgttcctaactctgttcgtcaacacattgttaaatatcaccatcgctagccgggtgttggaagatcgtctgacaaaatctgcatgcgcggccttcatcggcgacgacaacataatacatggtgtcgtctccgatgaattgatggcagccagatgcgctacttggatgaacatggaagtgaagatcatagatgcagttgtatcccagaaagctccctacttttgtggagggtttatactgcatgatactgtgacaggaacagcttgcagggtggcggacccgctaaaaaggttatttaaactgggcaaaccgttagcggcaggtgacgaacaagacgaagacagaaggcgggcgctggctgatgaagtaatcagatggcaacgaacagggctaatagatgagctggagaaagcggtgtactctaggtacgaagtgcagggtatatcagttgctgtaatgtccatggccacctttgcaagctccagatccaacttcgagaagctcagaggacccgtcataaccttgtacggcggtcctaaataggtacgcactacagctacctattttgcaaaagccgacagcaggtacctaaataccaatcagccataatggagtttatcccaacccaaactttctacaataggaggtaccagcctcgaccttggactccgcgccctactatccaagtcatcagacccagaccgcgtccgcaaaggaaggccgggcaacttgcccagctgatctcagcagttaataaactgacaatgcgcgtggtacctcaacagaagccgcgcaagaatcggaagaataagaagcaaaagcaaaagcagcaggcgccacgaaacaatacgaatcaaaagaagcagccccccaaaaagaaaccggttcaaaagaaaaagaagccgggccgcagagagagaatgtgcatgaaaatcgaaaatgattgcatcttcgaagtcaagcatgaaggtaaggtaacaggttacgcgtgcttggtaggggacaaagtaatgaagccagcacacgtaaaggggaccatcgataacgcggacctggccaaattggccttcaagcggtcatctaagtacgaccttgaatgcgcgcagatacccgtgcacatgaagtccgacgcttcgaagttcacccatgagaaaccggaggggtactacaactggcaccacggagcagtacagtactcaggaggccgattcaccatccctacaggtgcgggcaaaccaggggatagtggtagaccgatcttcgacaacaaggggcgcgtggtggccatagttttaggaggagctaatgaaggagcccgtacagccctctcggtggtgacctggaacaaagacatcgtcacgaaaatcacccctgagggggccgaagagtggagtctggccattccagttatgtgcctgctggcaaataccacgttcccctgctcccggcccccttgcacaccctgctgctacgaaaaagagccggagaaaaccttgcgcatgcttgaagacaatgtcatgagccccgggtactatcagctgctacaagcatccttaacatgttctccccgacgccagcggcgcagtattaaggaccacttcaatgtctataaagccacaagaccgtacctagctcactgtcccgactgtggagaagggcactcgtgccatagtcccgtagcgctagaacgcatcagaaacgaagcgacagacgggacgttgaaaatccaggtttccttgcaaatcggaataaagacggatgatagccatgattggaccaagctgcgttatatggacaatcacatgccagcagacgcagagcgggccgggctatttgtaagaacgtcagcaccgtgcacgattactggaacaatgggacacttcattctggcccgatgtccgaaaggagaaactctgacggtggggttcactgacggtaggaagatcagtcactcatgtacgcacccatttcaccatgaccctcctgtgataggccgggaaaaattccattcccgaccgcagcacggtagggaactaccttgcagcacgtacgcgcagagcaccgctgcaactgccgaggagatagaggtacacatgcccccagacaccccagatcgcacattaatgtcacaacagtccggcaatgtaaagatcacagtcaatagtcagacggtgcggtacaagtgcaattgtggtgactcaagtgaaggattaaccactacagataaagtgattaataactgcaaggtcgatcaatgccatgccgcggtcaccaatcacaaaaaatggcagtataattcccctctggtcccgcgtaatgctgaattcggggaccggaaaggaaaagttcacattccatttcctctggcaaatgtgacatgcagggtgcctaaagcaagaaaccccaccgtgacgtacggaaaaaaccaagtcatcatgttgctgtatcctgaccacccaacgctcctgtcctacaggaatatgggagaagaaccaaactatcaagaagagtgggtgacgcataagaaggagatcaggttaaccgtgccgactgaggggctcgaggtcacgtggggtaacaatgagccgtacaagtattggccgcagttatccacaaacggtacagcccacggccacccgcatgagataattctgtattattatgagctgtacccaactatgactgcggtagttttgtcagtggcctcgttcatactcctgtcgatggtgggtgtggcagtggggatgtgcatgtgtgcacgacgcagatgcattacaccgtacgaactgacaccaggagctaccgtccctttcctgcttagcctaatatgctgcattagaacagctaaagcggccacataccaggaggccgcggtatacctgtggaacgagcagcagcctttattttggatgcaagcccttattccgctggcagccctgattgtcctatgtaactgtctgagactcttaccatgctgttgtaaaatgttgacttttttagccgtactgagcgtcggtgcccacactgtgagcgcgtacgaacacgtaacagtgatcccgaacacggtgggagtaccgtataagactctagtcaacagaccgggctacagccccatggtattggagatggagcttctgtctgtcaccttggaaccaacgctatcgcttgattacatcacgtgcgagtataaaaccgttatcccgtctccgtacgtgaaatgctgcggtacagcagagtgtaaggacaagagcctacctgattacagctgtaaggtcttcaccggcgtctacccattcatgtggggcggcgcctactgcttctgcgacaccgaaaatacgcaattgagcgaagcacatgtggagaagtccgaatcatgcaaaacagaatttgcatcagcatacagggctcataccgcatccgcatcagctaagctccgcgtcctttaccaaggaaataatatcactgtggctgcttatgcaaacggcgaccatgccgtcacagttaaggacgctaaattcatagtggggccaatgtcttcagcctggacacctttcgacaataaaatcgtggtgtacaaaggcgacgtctacaacatggactacccgcccttcggcgcaggaagaccaggacaatttggcgacatccaaagtcgcacgcctgagagcgaagacgtctatgctaatacacaactggtactgcagagaccgtccgcgggtacggtgcacgtgccgtactctcaggcaccatctggcttcaagtattggctaaaagaacgaggggcgtcgctgcagcacacagcaccatttggctgtcaaatagcaacaaacccggtaagagcgatgaactgcgccgtagggaacatgcctatctccatcgacataccggacgcggcctttaccagggtcgtcgacgcgccatctttaacggacatgtcgtgtgaggtatcagcctgcacccattcctcagactttgggggcgtagccatcattaaatatgcagccagtaagaaaggcaagtgtgcagtgcactcgatgactaacgccgtcactattcgggaagctgaaatagaagtagaagggaactctcagttgcaaatctctttttcgacggccctagccagcgccgaatttcgcgtacaagtctgttctacacaagtacactgtgcagccgagtgccatccaccgaaagaccatatagtcaattacccggcgtcacacaccaccctcggggtccaagacatttccgctacggcgatgtcatgggtgcagaagatcacgggaggtgtgggactggttgtcgctgttgcagcactgatcctaatcgtggtgctatgcgtgtcgtttagcaggcactaacttgacaactaggtatgaaggcatacgcgtccctaaagagacacaccgcatatagctaggaatcaacagataagtatagatctaagggctgaacaacccctgaataacaaaatataaaaatcaacaaaaatcataaaatagaaaactagaaatagaagtaggtaagaaggtatatgtgtcccctaagagacacaccatatatagctaagaatcaatagataagcatagatcaaagggctgaacaacccctgaataataacaaaatataaaaaccaataaaaatcataaaatagaaaatcaacaaaaatcataaaatagaaaactagaaatagaagtaggtaagaaggtatatgtgtcccctaagagacacaccatatatagctaagaatcaatagataagcatagatcaaagggctgaacaacccctgaataataacaaaatataaaaaccaataaaaatcataaaatagaaaaccacaaatagaagtagttcaaagggctataaaacccctgaatagtaacaaaatataaaactaataaaaatcaaacgaataccataattggcaatcggaagagatgtaggtacttaagcttcttaaaagcagccgaactcgctttgagatgtaggcgtagcacaccgaactcttccataattctccgaacccacagggacgtaggagatgttcaaagtgactataaaaccctgaacagtaataaaatataaaattaataatgagtaccataattggcaaatggaagagacgtaggtactaagcttcttaaaagcagccgaactcactttgagatgtaggcatagcataccgaactcttccacaattctccgtacccatagggacgtaggagatgttattttgtttttaatatttcaaaaaaaaaaaaaaaaaaaaaaaaaaaaaaaaaaaaaaaaa

SEQ ID NO: 41 - DNA, 10014 bp, Artificial Sequence
  Synthetic sequence
atggctgcgtgagacacacgtagcctaccagtttcttactgctctactctgcaaagcaagagattaataacccatcatggattctgtgtacgtggatatagacgctgacagcgcctttttgaaggccctgcaacgtgcgtaccccatgtttgaggtggaacctaggcaggtcacatcaaatgaccatgctaatgctagagcgttctcgcatctagccataaaactaatagagcaggaaattgatcccgactcaaccatcctggatataggtagtgcgccagcaaggaggatgatgtcggacaggaagtaccactgcgtttgcccgatgcgcagcgcagaagatcccgagagactcgctaattatgcgagaaagctcgcatctgccgcaggaaaagtcctggacagaaacatttctggaaagatcggggacttacaagaggtgatggccgtgccagacacggagacgccaacattttgcctacacacagatgtctcatgtagacagagagcagacgtcgcgatataccaagacgtctatgctgtacatgcacccacgtcgctatatcaccaggcgattaaaggagtccgagtggcgtactgggtagggttcgacacaaccccgttcatgtacaacgctatggcgggtgcctacccctcatactaacccactctatgcatcaacatcagagcacgtcaacgtactcctaacgcgtacggaaggtaaactggtatggaagacactctctggtgacccgtggataaagacgctgcagaacccaccgaaaggaaacttcaaggcaactattaaggagtgggaggtggagcacgcatcgataatggcgggcatctgcagtcaccaagtgacctttgacacgttccaaaacaaagccaacgtttgctgggctaagagcttggtccctatcctcgaaacagcggggataaaactaaatgataggcagtggtcccagataattcaagctttcaaagaagacaaagcatactcacccgaagtagccctgaatgaaatatgcacgcgcatgtatggggtggatctagacagcgggctattctctaaaccgttggtatctgtgtattacgcggataaccactgggataataggccgggaggaaagatgttcggattcaaccctgaggcagcgtccattctagaaagaaagtacccgtttacaaaaggaaagtggaacatcaacaagcagatctgcgtgactaccaggaggatagaagacttcaaccctaccaccaacattataccggccaacaggagactaccacactcattagtggccgaacaccgcccagtaaaaggggaaagaatggaatggctggttaacaagataaacggacatcatgtgctcctggttagcggctataaccttgcactgcctactaagagagtcacctgggtagcgccactaggtgtccgcggagcggactatacatacaacctagagctgggtctaccggcaacacttggtaggtatgacctagtggtcataaacatccacacaccttttcgcatacaccattaccaacagtgcgtagatcacgcaatgaaactgcaaatgctaggaggtgactcactgagactgctcaaaccgggtggctctctattgatcagagcatacggttacgcagatagaaccagtgaacgagtaatctgcgtactgggacgtaagtttagatcgtccagagcattgaaaccaccatgtatcaccagtaatactgagatgttcttcctatttagcagttttgacaatggcagaaggaattttacaacgcatgttatgaacaatcaactgaacgcagcctttgtaggacaggccacccgagcaggatgtgcaccatcgtaccgggtaaagcgcatggacatcgcgaagaacgatgaagagtgcgtggtcaacgccgccaaccctcgcgggttaccgggtgacggtgtttgcaaggcagtatataaaaaatggccggagtcctttaaaaatagtgcaacaccagtaggaaccgcaaaaacagttatgtgcggtacatatccagtaatccatgccgtaggaccaaacttctcaaattacacggagtccgaaggggaccgggaattggcggctgcctatcgagaagtcgcaaaggaagtaactagactgggagtaaatagcgtagctatacctctcctctccacaggtgtatactcaggagggaaagacaggctaacccagtcactgaaccacctctttacagccatggactcgacggatgcagacgtggtcatctactgccgagacaaggaatgggagaagaaaatatctgaggccatacagatgcggacccaagtggagctgctggatgagcacatctccatagactgcgatgtcattcgcgtgcaccctgacagtagtttggcaggtagaaaaggatacagcaccacggaaggcgcactgtattcatatctagaagggacacgttttcaccagacggcagtggatgtggcagagatacatactatgtggccaaagcaaatagaggccaatgagcaagtctgcctatatgccctgggggaaagtattgagtcaatcaggcagaaatgcccggtggatgatgcagatgcatcatctcccccgaaaaccgtcccgtgcctttgccgttatgccatgactcctgaacgcgtcacccgacttcgcatgaaccatgtcacaaatataattgtgtgttcttcatttccccttccaaagtacaagatagaaggagtgcaaaaagtcaaatgctccaaggtaatgttatttgatcacaatgtgccatcgcgcgtaagtccaagggaatacagatcttcccaggagtctgtacgggaagtgagtatgacaacgtcattgacgcatagtcagtttgatctaagcgccgatggcgagacactgcccgtcccgtcagacctggatgctgacgccccagccctagaaccggccctagacgacggggcgatacatacgaccggaaaccttgcggccgtgtctgactgggtaatgagcaccgtacccgtcgcgccgcctagaagaaggagagggagaaacctgaccgtgatatgtgacgagagagaagggaatataacacccatggctagcgtccgattctttagagcagagcagtgtccgaccgtacaagaaacagcggagacgcgtgacacagctatttcctttcgggcaccgccaagtatcaccgtggaactgagccatccaccgatctccttcggagcaccaagcgagacgttccccatcacatttggggacttcaacgatggagaaatcgaaagcttgtcttctgagctactaactttcggagacttcctacccggtgaagtggatgatttgacagatagcgactggtccacgtgctcagacacggacgacgagttatgactagacagggcaggtgggtatatattctcgtcggacaccggtccaggccatttacaacagaagtcggtacgccagtcagtgctgccggtaaacaccctggaggaagttcacgaggagaagtgttacccacctaagctggatgaattaaaggagcaactactacttaagaaactccaggagagtgcgtccacggccaatagaagcaggtatcaatcacgcaaagtggaaaatatgaaagcaacaatcatccagagactaaagagaggctgtaaactgtatttaatggcagagaccccgaaagtcccgacttatcggaccgtatacccggcgcctgtgtactcgcctccgatcaacgtccgattgtccaatcccgagtccgcagtggcagcatgtaatgagttcttagctagaaactacccaactgtttcatcataccaaatcaccgatgagtatgatgcatatctagacatggtggacgggtcggagagttgcttggaccgagcgacattcaatccgtcaaaacttaggagctacccgaaacaacatgcttatcacgcgccctctatcagaagcgctgtaccttccccattccagaacacactacagaatgtactggcagcagccacgaaaaggaactgcaacgtcacacagatgagggaattacccactttggactcagcagtattcaacgtggagtgttttaaaaaattcgcatgcaaccgagaatactgggaagaatttgctgccagccctatcaggataacgactgagaatctaacaacctatgtcactaaattaaaggggccaaaagcagcagcgttgcttgcaagaacccataatctgctgccgctgcaggatgtaccaatggataggttcacagtagatatgaaaagggacgtgaaggtaactcctggcacaaagcatacagaggaaaggcctaaggtgcaggttatacaggcggctgaacccttggcaacagcgtacctatgtggaattcacagagaattggttaggagattgaacgccgtcctcctacccaacgtgcatacactatttgacatgtctgccgaggacttcgatgccattatagccgcacactttaagccaggagacgccgttttagaaacggacatagcctcctttgataagagccaggatgattcacttgcgcttaccgccttaatgctgttagaagatttgggagtggatcactccttgttggacctgatagaggctgcttttggagagatttccagctgtcacctgccgacaggtacgcgcttcaagttcggcgctatgatgaaatccggtatgttcctaactctgttcgtcaacacattgttaaatatcaccatcgctagccgggtgttggaagatcgtctgacaaaatctgcatgcgcggccttcatcggcgacgacaacataatacatggtgtcgtctccgatgaattgatggcagccagatgcgctacttggatgaacatggaagtgaagatcatagatgcagttgtatcccagaaagctccctacttttgtggagggtttatactgcatgatactgtgacaggaacagcttgcagggtggcggacccgctaaaaaggttatttaaactgggcaaaccgttagcggcaggtgacgaacaagacgaagacagaaggcgggcgctggctgatgaagtaatcagatggcaacgaacagggctaatagatgagctggagaaagcggtgtactctaggtacgaagtgcagggtatatcagttgctgtaatgtccatggccacctttgcaagctccagatccaacttcgagaagctcagaggacccgtcataaccttgtacggcggtcctaaataggtacgcactacagctacctattttgcaaaagccgacagcaggtacctaaataccaatcagccataatggagtttatcccaacccaaactttctacaataggaggtaccagcctcgaccttggactccgcgccctactatccaagtcatcagacccagaccgcgtccgcaaaggaaggccgggcaacttgcccagctgatctcagcagttaataaactgacaatgcgcgtggtacctcaacagaagccgcgcaagaatcggaagaataagaagcaaaagcaaaagcagcaggcgccacgaaacaatacgaatcaaaagaagcagccccccaaaaagaaaccggttcaaaagaaaaagaagccgggccgcagagagagaatgtgcatgaaaatcgaaaatgattgcatcttcgaagtcaagcatgaaggtaaggtaacaggttacgcgtgcttggtaggggacaaagtaatgaagccagcacacgtaaaggggaccatcgataacgcggacctggccaaattggccttcaagcggtcatctaagtacgaccttgaatgcgcgcagatacccgtgcacatgaagtccgacgcttcgaagttcacccatgagaaaccggaggggtactacaactggcaccacggagcagtacagtactcaggaggccgattcaccatccctacaggtgcgggcaaaccaggggatagtggtagaccgatcttcgacaacaaggggcgcgtggtggccatagttttaggaggagctaatgaaggagcccgtacagccctctcggtggtgacctggaacaaagacatcgtcacgaaaatcacccctgagggggccgaagagtggagtctggccattccagttatgtgcctgctggcaaataccacgttcccctgctcccggcccccttgcacaccctgctgctacgaaaaagagccggagaaaaccttgcgcatgcttgaagacaatgtcatgagccccgggtactatcagctgctacaagcatccttaacatgttctccccgacgccagcggcgcagtattaaggaccacttcaatgtctataaagccacaagaccgtacctagctcactgtcccgactgtggagaagggcactcgtgccatagtcccgtagcgctagaacgcatcagaaacgaagcgacagacgggacgttgaaaatccaggtttccttgcaaatcggaataaagacggatgatagccatgattggaccaagctgcgttatatggacaatcacatgccagcagacgcagagcgggccgggctatttgtaagaacgtcagcaccgtgcacgattactggaacaatgggacacttcattctggcccgatgtccgaaaggagaaactctgacggtggggttcactgacggtaggaagatcagtcactcatgtacgcacccatttcaccatgaccctcctgtgataggccgggaaaaattccattcccgaccgcagcacggtagggaactaccttgcagcacgtacgcgcagagcaccgctgcaactgccgaggagatagaggtacacatgcccccagacaccccagatcgcacattaatgtcacaacagtccggcaatgtaaagatcacagtcaatagtcagacggtgcggtacaagtgcaattgtggtgactcaagtgaaggattaaccactacagataaagtgattaataactgcaaggtcgatcaatgccatgccgcggtcaccaatcacaaaaaatggcagtataattcccctctggtcccgcgtaatgctgaattcggggaccggaaaggaaaagttcacattccatttcctctggcaaatgtgacatgcagggtgcctaaagcaagaaaccccaccgtgacgtacggaaaaaaccaagtcatcatgttgctgtatcctgaccacccaacgctcctgtcctacaggaatatgggagaagaaccaaactatcaagaagagtgggtgacgcataagaaggagatcaggttaaccgtgccgactgaggggctcgaggtcacgtggggtaacaatgagccgtacaagtattggccgcagttatccacaaacggtacagcccacggccacccgcatgagataattctgtattattatgagctgtacccaactatgactgcggtagttttgtcagtggcctcgttcatactcctgtcgatggtgggtgtggcagtggggatgtgcatgtgtgcacgacgcagatgcattacaccgtacgaactgacaccaggagctaccgtccctttcctgcttagcctaatatgctgcattagaacagctaaagcggccacataccaggaggccgcggtatacctgtggaacgagcagcagcctttattttggatgcaagcccttattccgctggcagccctgattgtcctatgtaactgtctgagactcttaccatgctgttgtaaaatgttgacttttttagccgtactgagcgtcggtgcccacactgtgagcgcgtacgaacacgtaacagtgatcccgaacacggtgggagtaccgtataagactctagtcaacagaccgggctacagccccatggtattggagatggagcttctgtctgtcaccttggaaccaacgctatcgcttgattacatcacgtgcgagtataaaaccgttatcccgtctccgtacgtgaaatgctgcggtacagcagagtgtaaggacaagagcctacctgattacagctgtaaggtcttcaccggcgtctacccattcatgtggggcggcgcctactgcttctgcgacaccgaaaatacgcaattgagcgaagcacatgtggagaagtccgaatcatgcaaaacagaatttgcatcagcatacagggctcataccgcatccgcatcagctaagctccgcgtcctttaccaaggaaataatatcactgtggctgcttatgcaaacggcgaccatgccgtcacagttaaggacgctaaattcatagtggggccaatgtcttcagcctggacacctttcgacaataaaatcgtggtgtacaaaggcgacgtctacaacatggactacccgcccttcggcgcaggaagaccaggacaatttggcgacatccaaagtcgcacgcctgagagcgaagacgtctatgctaatacacaactggtactgcagagaccgtccgcgggtacggtgcacgtgccgtactctcaggcaccatctggcttcaagtattggctaaaagaacgaggggcgtcgctgcagcacacagcaccatttggctgtcaaatagcaacaaacccggtaagagcgatgaactgcgccgtagggaacatgcctatctccatcgacataccggacgcggcctttaccagggtcgtcgacgcgccatctttaacggacatgtcgtgtgaggtatcagcctgcacccattcctcagactttgggggcgtagccatcattaaatatgcagccagtaagaaaggcaagtgtgcagtgcactcgatgactaacgccgtcactattcgggaagctgaaatagaagtagaagggaactctcagttgcaaatctctttttcgacggccctagccagcgccgaatttcgcgtacaagtctgttctacacaagtacactgtgcagccgagtgccatccaccgaaagaccatatagtcaattacccggcgtcacacaccaccctcggggtccaagacatttccgctacggcgatgtcatgggtgcagaagatcacgggaggtgtgggactggttgtcgctgttgcagcactgatcctaatcgtggtgctatgcgtgtcgtttagcaggcactaacttgacaactaggtatgaaggcatacgcgtccctaaagagacacaccgcatatagctaggaatcaacagataagtatagatctaagggctgaacaacccctgaataacaaaatataaaaatcaacaaaaatcataaaatagaaaactagaaatagaagtaggtaagaaggtatatgtgtcccctaagagacacaccatatatagctaagaatcaatagataagcatagatcaaagggctgaacaacccctgaataataacaaaatataaaaaccaataaaaatcataaaatagaaaatcaacaaaaatcataaaatagaaaactagaaatagaagtaggtaagaaggtatatgtgtcccctaagagacacaccatatatagctaagaatcaatagataagcatagatcaaagggctgaacaacccctgaataataacaaaatataaaaaccaataaaaatcataaaatagaaaaccacaaatagaagtagttcaaagggctataaaacccctgaatagtaacaaaatataaaactaataaaaatcaaacgaataccataattggcaatcggaagagatgtaggtacttaagcttcttaaaagcagccgaactcgctttgagatgtaggcgtagcacaccgaactcttccataattctccgaacccacagggacgtaggagatgttcaaagtgactataaaaccctgaacagtaataaaatataaaattaataatgagtaccataattggcaaatggaagagacgtaggtactaagcttcttaaaagcagccgaactcactttgagatgtaggcatagcataccgaactcttccacaattctccgtacccatagggacgtaggagatgttattttgtttttaatatttcaaaaaaaaaaaaaaaaaaaaaaaaaaaaaaaaaaaaaaaaa

SEQ ID NO: 42 - DNA, 4595 bp, Artificial Sequence
  Synthetic sequence
atggctgcgtgagacacacgtagcctaccagtttcttactgctctactctgcaaagcaagagattaataacccatcatggattctgtgtacgtggatatagacgctgacagcgcctttttgaaggccctgcaacgtgcgtaccccatgtttgaggtggaacctaggcaggtcacatcaaatgaccatgctaatgctagagcgttctcgcatctagccataaaactaatagagcaggaaattgatcccgactcaaccatcctggatataggtagtgcgccagcaaggaggatgatgtcggacaggaagtaccactgcgtttgcccgatgcgcagcgcagaagatcccgagagactcgctaattatgcgagaaagctcgcatctgccgcaggaaaagtcctggacagaaacatttctggaaagatcggggacttacaagaggtgatggccgtgccagacacggagacgccaacattttgcctacacacagatgtctcatgtagacagagagcagacgtcgcgatataccaagacgtctatgctgtacatgcacccacgtcgctatatcaccaggcgattaaaggagtccgagtggcgtactgggtagggttcgacacaaccccgttcatgtacaacgctatggcgggtgcctacccctcatactcgacaaattgggcggatgagcaggtactgaaggctaagaacataggattatgttcaacagacctgacagaaggtagacgaggcaaattgtctatcatgagagggaaaaagctaaaaccgtgcgaccgtgtgctgttctcagtagggtcaacgctttacccggaaagccgcatgctacttaagagctggcacctaccatcggtgttccatctaaagggcaagcttagcttcacatgccgctgtgacacagtggtttcgtgtgagggctacgtcgttaagagaataacgatgagcccaggcctttatggaaaaaccacggggtatgcggtaacccaccacgcagacggattcttgatgtgcaagactaccgacacggtagacggtgaaagagtgtcattctcggtgtgcacgtacgtgccggcgaccatttgtgatcaaatgaccggcatccttgctacagaagtcacgccggaggatgcacagaagctgttggtggggctgaaccagagaatagtggttaacggcagaacgcaacggaacacgaacaccatgaagaactacctgcttcccgtggtcgcccaggccttcagtaagtgggcgaaggagtgccggaaggacatggaagatgagaagcttttgggggtcagagaaagaacactgacctgctgctgtctgtgggcatttaagaagcagaaaacacacacggtctacaagaggcctgatacccagtcaatccagaaggttcaggccgaattcgacagctttgtagtaccaggcctgtggtcgtccgggttgtcaatcccgttgaggactagaatcaagtggctgttacgcaaggtgccgaaagcagacctgatcccatatagcggaaatgcccaagaagcccaggatgctgaaaaagaagcagaggaagaacgagaagcagaactgactcatgaggctctaccacccctacaggcagcacaggaagatgtccaggtcgaaatcgacgtggaacaacttgaggatagagctggtgctggaataatagagactccgagaggcgctattaaagttactgcccaactaacggaccacgtcgtgggggagtacctggtactttccccgcagaccgtattacgcagccagaagctcagcctgatccacgctttagcggagcaagtgaagacgtgtacgcatagcggacgagcagggaggtatgcggtcgaagcgtacgatggccgagtcctagtgccctcaggctatgcaatttcgcccgaagacttccagagtctaagcgaaagcgcaacgatggtgtacaacgaaagagagttcgtaaacagaaagttacaccacattgcgatgcacggaccagctctgaacactgacgaagagtcgtatgagcttgtgagggcagagaggacagaacacgagtacgtctacgacgtggaccagagaagatgctgcaagaaggaagaagctgcaggattggtactggtgggcgacttgactaatccgccctaccacgaattcgcatacgaagggctaaaaattcgccccgcttgtccatataaaattgcagtcataggagtcttcggggtaccaggatctggtaagtcagccattatcaagaacctagttaccaggcaagacctggtgactagcggaaagaaagaaaactgccaagaaatcagcaccgacgtgatgagacagagaggtctagaaatatctgcacgtacggttgattcgctgctcttgaatggatgcaatagaccagtcgacgtgttgtacgtagacgaggcgtttgcgtgccactctggaacgttacttgccttgatcgccttggtgagaccaagactgaaagttgtactttgtggtgacccgaagcagtgcggcttcttcaatatgatgcagatgaaagtcaactacaatcataacatctgcactcaagtgtaccacaaaagtatttccaggcggtgtacactgcctgtgactgccattgtgtcgtcgttgcattacgaaggcaaaatgcgcactacgaatgagtacaacatgccgattgtagtggacactacgggctcaacaaaacctgaccctggagacctcgtgttaacgtgcttcagagggtgggttaaacaactgcaaattgactatcgtggacacgaggtcatgacagcagccgcatcccaagggttaaccagaaaaggagtttacgcagttaggcaaaaagttaacgaaaacccactctatgcatcaacatcagagcacgtcaacgtactcctaacgcgtacggaaggtaaactggtatggaagacactctctggtgacccgtggataaagacgctgcagaacccaccgaaaggaaacttcaaggcaactattaaggagtgggaggtggagcacgcatcgataatggcgggcatctgcagtcaccaagtgacctttgacacgttccaaaacaaagccaacgtttgctgggctaagagcttggtccctatcctcgaaacagcggggataaaactaaatgataggcagtggtcccagataattcaagctttcaaagaagacaaagcatactcacccgaagtagccctgaatgaaatatgcacgcgcatgtatggggtggatctagacagcgggctattctctaaaccgttggtatctgtgtattacgcggataaccactgggataataggccgggaggaaagatgttcggattcaaccctgaggcagcgtccattctagaaagaaagtacccgtttacaaaaggaaagtggaacatcaacaagcagatctgcgtgactaccaggaggatagaagacttcaaccctaccaccaacattataccggccaacaggagactaccacactcattagtggccgaacaccgcccagtaaaaggggaaagaatggaatggctggttaacaagataaacggacatcatgtgctcctggttagcggctataaccttgcactgcctactaagagagtcacctgggtagcgccactaggtgtccgcggagcggactatacatacaacctagagctgggtctaccggcaacacttggtaggtatgacctagtggtcataaacatccacacaccttttcgcatacaccattaccaacagtgcgtagatcacgcaatgaaactgcaaatgctaggaggtgactcactgagactgctcaaaccgggtggctctctattgatcagagcatacggttacgcagatagaaccagtgaacgagtaagatcaaagggctgaacaacccctgaataataacaaaatataaaaaccaataaaaatcataaaatagaaaatcaacaaaaatcataaaatagaaaactagaaatagaagtaggtaagaaggtatatgtgtcccctaagagacacaccatatatagctaagaatcaatagataagcatagatcaaagggctgaacaacccctgaataataacaaaatataaaaaccaataaaaatcataaaatagaaaaccacaaatagaagtagttcaaagggctataaaacccctgaatagtaacaaaatataaaactaataaaaatcaaacgaataccataattggcaatcggaagagatgtaggtacttaagcttcttaaaagcagccgaactcgctttgagatgtaggcgtagcacaccgaactcttccataattctccgaacccacagggacgtaggagatgttcaaagtgactataaaaccctgaacagtaataaaatataaaattaataatgagtaccataattggcaaatggaagagacgtaggtactaagcttcttaaaagcagccgaactcactttgagatgtaggcatagcataccgaactcttccacaattctccgtacccatagggacgtaggagatgttattttgtttttaatatttcaaaaaaaaaaaaaaaaaaaaaaaaaaaaaaaaaaaaaaaaa

SEQ ID NO: 43 - DNA, 4418 bp, Artificial Sequence
  Synthetic sequence
atggctgcgtgagacacacgtagcctaccagtttcttactgctctactctgcaaagcaagagattaataacccatcatggattctgtgtacgtggatatagacgctgacagcgcctttttgaaggccctgcaacgtgcgtaccccatgtttgaggtggaacctaggcaggtcacatcaaatgaccatgctaatgctagagcgttctcgcatctagccataaaactaatagagcaggaaattgatcccgactcaaccatcctggatataggtagtgcgccagcaaggaggatgatgtcggacaggaagtaccactgcgtttgcccgatgcgcagcgcagaagatcccgagagactcgctaattatgcgagaaagctcgcatctgccgcaggaaaagtcctggacagaaacatttctggaaagatcggggacttacaagaggtgatggccgtgccagacacggagacgccaacattttgcctacacacagatgtctcatgtagacagagagcagacgtcgcgatataccaagacgtctatgctgtacatgcacccacgtcgctatatcaccaggcgattaaaggagtccgagtggcgtactgggtagggttcgacacaaccccgttcatgtacaacgctatggcgggtgcctacccctcatactcgacaaattgggcggatgagcaggtactgaaggctaagaacataggattatgttcaacagacctgacagaaggtagacgaggcaaattgtctatcatgagagggaaaaagctaaaaccgtgcgaccgtgtgctgttctcagtagggtcaacgctttacccggaaagccgcatgctacttaagagctggcacctaccatcggtgttccatctaaagggcaagcttagcttcacatgccgctgtgacacagtggtttcgtgtgagggctacgtcgttaagagaataacgatgagcccaggcctttatggaaaaaccacggggtatgcggtaacccaccacgcagacggattcttgatgtgcaagactaccgacacggtagacggtgaaagagtgtcattctcggtgtgcacgtacgtgccggcgaccatttgtgatcaaatgaccggcatccttgctacagaagtcacgccggaggatgcacagaagctgttggtggggctgaaccagagaatagtggttaacggcagaacgcaacggaacacgaacaccatgaagaactacctgcttcccgtggtcgcccaggccttcagtaagtgggcgaaggagtgccggaaggacatggaagatgagaagcttttgggggtcagagaaagaacactgacctgctgctgtctgtgggcatttaagaagcagaaaacacacacggtctacaagaggcctgatacccagtcaatccagaaggttcaggccgaattcgacagctttgtagtaccaggcctgtggtcgtccgggttgtcaatcccgttgaggactagaatcaagtggctgttacgcaaggtgccgaaagcagacctgatcccatatagcggaaatgcccaagaagcccaggatgctgaaaaagaagcagaggaagaacgagaagcagaactgactcatgaggctctaccacccctacaggcagcacaggaagatgtccaggtcgaaatcgacgtggaacaacttgaggatagagctggtgctggaataatagagactccgagaggcgctattaaagttactgcccaactaacggaccacgtcgtgggggagtacctggtactttccccgcagaccgtattacgcagccagaagctcagcctgatccacgctttagcggagcaagtgaagacgtgtacgcatagcggacgagcagggaggtatgcggtcgaagcgtacgatggccgagtcctagtgccctcaggctatgcaatttcgcccgaagacttccagagtctaagcgaaagcgcaacgatggtgtacaacgaaagagagttcgtaaacagaaagttacaccacattgcgatgcacggaccagctctgaacactgacgaagagtcgtatgagcttgtgagggcagagaggacagaacacgagtacgtctacgacgtggaccagagaagatgctgcaagaaggaagaagctgcaggattggtactggtgggcgacttgactaatccgccctaccacgaattcgcatacgaagggctaaaaattcgccccgcttgtccatataaaattgcagtcataggagtcttcggggtaccaggatctggtaagtcagccattatcaagaacctagttaccaggcaagacctggtgactagcggaaagaaagaaaactgccaagaaatcagcaccgacgtgatgagacagagaggtctagaaatatctgcacgtacggttgattcgctgctcttgaatggatgcaatagaccagtcgacgtgttgtacgtagacgaggcgtttgcgtgccactctggaacgttacttgccttgatcgccttggtgagaccaagactgaaagttgtactttgtggtgacccgaagcagtgcggcttcttcaatatgatgcagatgaaagtcaactacaatcataacatctgcactcaagtgtaccacaaaagtatttccaggcggtgtacactgcctgtgactgccattgtgtcgtcgttgcattacgaaggcaaaatgcgcactacgaatgagtacaacatgccgattgtagtggacactacgggctcaacaaaacctgaccctggagacctcgtgttaacgtgcttcagagggtgggttaaacaactgcaaattgactatcgtggacacgaggtcatgacagcagccgcatcccaagggttaaccagaaaaggagtttacgcagttaggcaaaaagttaacgaaaacccactctatgcatcaacatcagagcacgtcaacgtactcctaacgcgtacggaaggtaaactggtatggaagacactctctggtgacccgtggataaagacgctgcagaacccaccgaaaggaaacttcaaggcaactattaaggagtgggaggtggagcacgcatcgataatggcgggcatctgcagtcaccaagtgacctttgacacgttccaaaacaaagccaacgtttgctgggctaagagcttggtccctatcctcgaaacagcggggataaaactaaatgataggcagtggtcccagataattcaagctttcaaagaagacaaagcatactcacccgaagtagccctgaatgaaatatgcacgcgcatgtatggggtggatctagacagcgggctattctctaaaccgttggtatctgtgtattacgcggataaccactgggataataggccgggaggaaagatgttcggattcaaccctgaggcagcgtccattctagaaagaaagtacccgtttacaaaaggaaagtggaacatcaacaagcagatctgcgtgactaccaggaggatagaagacttcaaccctaccaccaacattataccggccaacaggagactaccacactcattagtggccgaacaccgcccagtaaaaggggaaagaatggaatggctggttaacaagataaacggacatcatgtgctcctggttagcggctataaccttgcactgcctactaagagagtcacctgggtagcgccactaggtgtccgcggagcggactatacatacaacctagagctgggtctaccggcaacacttggtaggtatgacctagtggtcataaacatccacacaccttttcgcatacaccattaccaacagtgcgtagatcacgcaatgaaactgcaaatgctaggaggtgactcactgagactgctcaaaccgggtggctctctattgatcagagcatacggttacgcagatagaaccagtgaacgagtaagatcaaagggctgaacaacccctgaataataacaaaatataaaaaccaataaaaatcataaaatagaaaaccacaaatagaagtagttcaaagggctataaaacccctgaatagtaacaaaatataaaactaataaaaatcaaacgaataccataattggcaatcggaagagatgtaggtacttaagcttcttaaaagcagccgaactcgctttgagatgtaggcgtagcacaccgaactcttccataattctccgaacccacagggacgtaggagatgttcaaagtgactataaaaccctgaacagtaataaaatataaaattaataatgagtaccataattggcaaatggaagagacgtaggtactaagcttcttaaaagcagccgaactcactttgagatgtaggcatagcataccgaactcttccacaattctccgtacccatagggacgtaggagatgttattttgtttttaatatttcaaaaaaaaaaaaaaaaaaaaaaaaaaaaaaaaaaaaaaaaa

SEQ ID NO: 44 - DNA, 10549 bp, Artificial Sequence
  Synthetic sequence
atggctgcgtgagacacacgtagcctaccagtttcttactgctctactctgcaaagcaagagattaataacccatcatggattctgtgtacgtggatatagacgctgacagcgcctttttgaaggccctgcaacgtgcgtaccccatgtttgaggtggaacctaggcaggtcacatcaaatgaccatgctaatgctagagcgttctcgcatctagccataaaactaatagagcaggaaattgatcccgactcaaccatcctggatataggtagtgcgccagcaaggaggatgatgtcggacaggaagtaccactgcgtttgcccgatgcgcagcgcagaagatcccgagagactcgctaattatgcgagaaagctcgcatctgccgcaggaaaagtcctggacagaaacatttctggaaagatcggggacttacaagaggtgatggccgtgccagacacggagacgccaacattttgcctacacacagatgtctcatgtagacagagaaaattcgccccgcttgtccatataaaattgcagtcataggagtcttcggggtaccaggatctggtaagtcagccattatcaagaacctagttaccaggcaagacctggtgactagcggaaagaaagaaaactgccaagaaatcagcaccgacgtgatgagacagagaggtctagaaatatctgcacgtacggttgattcgctgctcttgaatggatgcaatagaccagtcgacgtgttgtacgtagacgaggcgtttgcgtgccactctggaacgttacttgccttgatcgccttggtgagaccaagactgaaagttgtactttgtggtgacccgaagcagtgcggcttcttcaatatgatgcagatgaaagtcaactacaatcataacatctgcactcaagtgtaccacaaaagtatttccaggcggtgtacactgcctgtgactgccattgtgtcgtcgttgcattacgaaggcaaaatgcgcactacgaatgagtacaacatgccgattgtagtggacactacgggctcaacaaaacctgaccctggagacctcgtgttaacgtgcttcagagggtgggttaaacaactgcaaattgactatcgtggacacgaggtcatgacagcagccgcatcccaagggttaaccagaaaaggagtttacgcagttaggcaaaaagttaacgaaaacccactctatgcatcaacatcagagcacgtcaacgtactcctaacgcgtacggaaggtaaactggtatggaagacactctctggtgacccgtggataaagacgctgcagaacccaccgaaaggaaacttcaaggcaactattaaggagtgggaggtggagcacgcatcgataatggcgggcatctgcagtcaccaagtgacctttgacacgttccaaaacaaagccaacgtttgctgggctaagagcttggtccctatcctcgaaacagcggggataaaactaaatgataggcagtggtcccagataattcaagctttcaaagaagacaaagcatactcacccgaagtagccctgaatgaaatatgcacgcgcatgtatggggtggatctagacagcgggctattctctaaaccgttggtatctgtgtattacgcggataaccactgggataataggccgggaggaaagatgttcggattcaaccctgaggcagcgtccattctagaaagaaagtacccgtttacaaaaggaaagtggaacatcaacaagcagatctgcgtgactaccaggaggatagaagacttcaaccctaccaccaacattataccggccaacaggagactaccacactcattagtggccgaacaccgcccagtaaaaggggaaagaatggaatggctggttaacaagataaacggacatcatgtgctcctggttagcggctataaccttgcactgcctactaagagagtcacctgggtagcgccactaggtgtccgcggagcggactatacatacaacctagagctgggtctaccggcaacacttggtaggtatgacctagtggtcataaacatccacacaccttttcgcatacaccattaccaacagtgcgtagatcacgcaatgaaactgcaaatgctaggaggtgactcactgagactgctcaaaccgggtggctctctattgatcagagcatacggttacgcagatagaaccagtgaacgagtaatctgcgtactgggacgtaagtttagatcgtccagagcattgaaaccaccatgtatcaccagtaatactgagatgttcttcctatttagcagttttgacaatggcagaaggaattttacaacgcatgttatgaacaatcaactgaacgcagcctttgtaggacaggccacccgagcaggatgtgcaccatcgtaccgggtaaagcgcatggacatcgcgaagaacgatgaagagtgcgtggtcaacgccgccaaccctcgcgggttaccgggtgacggtgtttgcaaggcagtatataaaaaatggccggagtcctttaaaaatagtgcaacaccagtaggaaccgcaaaaacagttatgtgcggtacatatccagtaatccatgccgtaggaccaaacttctcaaattacacggagtccgaaggggaccgggaattggcggctgcctatcgagaagtcgcaaaggaagtaactagactgggagtaaatagcgtagctatacctctcctctccacaggtgtatactcaggagggaaagacaggctaacccagtcactgaaccacctctttacagccatggactcgacggatgcagacgtggtcatctactgccgagacaaggaatgggagaagaaaatatctgaggccatacagatgcggacccaagtggagctgctggatgagcacatctccatagactgcgatgtcattcgcgtgcaccctgacagtagtttggcaggtagaaaaggatacagcaccacggaaggcgcactgtattcatatctagaagggacacgttttcaccagacggcagtggatgtggcagagatacatactatgtggccaaagcaaatagaggccaatgagcaagtctgcctatatgccctgggggaaagtattgagtcaatcaggcagaaatgcccggtggatgatgcagatgcatcatctcccccgaaaaccgtcccgtgcctttgccgttatgccatgactcctgaacgcgtcacccgacttcgcatgaaccatgtcacaaatataattgtgtgttcttcatttccccttccaaagtacaagatagaaggagtgcaaaaagtcaaatgctccaaggtaatgttatttgatcacaatgtgccatcgcgcgtaagtccaagggaatacagatcttcccaggagtctgtacgggaagtgagtatgacaacgtcattgacgcatagtcagtttgatctaagcgccgatggcgagacactgcccgtcccgtcagacctggatgctgacgccccagccctagaaccggccctagacgacggggcgatacatacgaccggaaaccttgcggccgtgtctgactgggtaatgagcaccgtacccgtcgcgccgcctagaagaaggagagggagaaacctgaccgtgatatgtgacgagagagaagggaatataacacccatggctagcgtccgattctttagagcagagcagtgtccgaccgtacaagaaacagcggagacgcgtgacacagctatttcctttcgggcaccgccaagtatcaccgtggaactgagccatccaccgatctccttcggagcaccaagcgagacgttccccatcacatttggggacttcaacgatggagaaatcgaaagcttgtcttctgagctactaactttcggagacttcctacccggtgaagtggatgatttgacagatagcgactggtccacgtgctcagacacggacgacgagttatgactagacagggcaggtgggtatatattctcgtcggacaccggtccaggccatttacaacagaagtcggtacgccagtcagtgctgccggtaaacaccctggaggaagttcacgaggagaagtgttacccacctaagctggatgaattaaaggagcaactactacttaagaaactccaggagagtgcgtccacggccaatagaagcaggtatcaatcacgcaaagtggaaaatatgaaagcaacaatcatccagagactaaagagaggctgtaaactgtatttaatggcagagaccccgaaagtcccgacttatcggaccgtatacccggcgcctgtgtactcgcctccgatcaacgtccgattgtccaatcccgagtccgcagtggcagcatgtaatgagttcttagctagaaactacccaactgtttcatcataccaaatcaccgatgagtatgatgcatatctagacatggtggacgggtcggagagttgcttggaccgagcgacattcaatccgtcaaaacttaggagctacccgaaacaacatgcttatcacgcgccctctatcagaagcgctgtaccttccccattccagaacacactacagaatgtactggcagcagccacgaaaaggaactgcaacgtcacacagatgagggaattacccactttggactcagcagtattcaacgtggagtgttttaaaaaattcgcatgcaaccgagaatactgggaagaatttgctgccagccctatcaggataacgactgagaatctaacaacctatgtcactaaattaaaggggccaaaagcagcagcgttgcttgcaagaacccataatctgctgccgctgcaggatgtaccaatggataggttcacagtagatatgaaaagggacgtgaaggtaactcctggcacaaagcatacagaggaaaggcctaaggtgcaggttatacaggcggctgaacccttggcaacagcgtacctatgtggaattcacagagaattggttaggagattgaacgccgtcctcctacccaacgtgcatacactatttgacatgtctgccgaggacttcgatgccattatagccgcacactttaagccaggagacgccgttttagaaacggacatagcctcctttgataagagccaggatgattcacttgcgcttaccgccttaatgctgttagaagatttgggagtggatcactccttgttggacctgatagaggctgcttttggagagatttccagctgtcacctgccgacaggtacgcgcttcaagttcggcgctatgatgaaatccggtatgttcctaactctgttcgtcaacacattgttaaatatcaccatcgctagccgggtgttggaagatcgtctgacaaaatctgcatgcgcggccttcatcggcgacgacaacataatacatggtgtcgtctccgatgaattgatggcagccagatgcgctacttggatgaacatggaagtgaagatcatagatgcagttgtatcccagaaagctccctacttttgtggagggtttatactgcatgatactgtgacaggaacagcttgcagggtggcggacccgctaaaaaggttatttaaactgggcaaaccgttagcggcaggtgacgaacaagacgaagacagaaggcgggcgctggctgatgaagtaatcagatggcaacgaacagggctaatagatgagctggagaaagcggtgtactctaggtacgaagtgcagggtatatcagttgctgtaatgtccatggccacctttgcaagctccagatccaacttcgagaagctcagaggacccgtcataaccttgtacggcggtcctaaataggtacgcactacagctacctattttgcaaaagccgacagcaggtacctaaataccaatcagccataatggagtttatcccaacccaaactttctacaataggaggtaccagcctcgaccttggactccgcgccctactatccaagtcatcagacccagaccgcgtccgcaaaggaaggccgggcaacttgcccagctgatctcagcagttaataaactgacaatgcgcgtggtacctcaacagaagccgcgcaagaatcggaagaataagaagcaaaagcaaaagcagcaggcgccacgaaacaatacgaatcaaaagaagcagccccccaaaaagaaaccggttcaaaagaaaaagaagccgggccgcagagagagaatgtgcatgaaaatcgaaaatgattgcatcttcgaagtcaagcatgaaggtaaggtaacaggttacgcgtgcttggtaggggacaaagtaatgaagccagcacacgtaaaggggaccatcgataacgcggacctggccaaattggccttcaagcggtcatctaagtacgaccttgaatgcgcgcagatacccgtgcacatgaagtccgacgcttcgaagttcacccatgagaaaccggaggggtactacaactggcaccacggagcagtacagtactcaggaggccgattcaccatccctacaggtgcgggcaaaccaggggatagtggtagaccgatcttcgacaacaaggggcgcgtggtggccatagttttaggaggagctaatgaaggagcccgtacagccctctcggtggtgacctggaacaaagacatcgtcacgaaaatcacccctgagggggccgaagagtggagtctggccattccagttatgtgcctgctggcaaataccacgttcccctgctcccggcccccttgcacaccctgctgctacgaaaaagagccggagaaaaccttgcgcatgcttgaagacaatgtcatgagccccgggtactatcagctgctacaagcatccttaacatgttctccccgacgccagcggcgcagtattaaggaccacttcaatgtctataaagccacaagaccgtacctagctcactgtcccgactgtggagaagggcactcgtgccatagtcccgtagcgctagaacgcatcagaaacgaagcgacagacgggacgttgaaaatccaggtttccttgcaaatcggaataaagacggatgatagccatgattggaccaagctgcgttatatggacaatcacatgccagcagacgcagagcgggccgggctatttgtaagaacgtcagcaccgtgcacgattactggaacaatgggacacttcattctggcccgatgtccgaaaggagaaactctgacggtggggttcactgacggtaggaagatcagtcactcatgtacgcacccatttcaccatgaccctcctgtgataggccgggaaaaattccattcccgaccgcagcacggtagggaactaccttgcagcacgtacgcgcagagcaccgctgcaactgccgaggagatagaggtacacatgcccccagacaccccagatcgcacattaatgtcacaacagtccggcaatgtaaagatcacagtcaatagtcagacggtgcggtacaagtgcaattgtggtgactcaagtgaaggattaaccactacagataaagtgattaataactgcaaggtcgatcaatgccatgccgcggtcaccaatcacaaaaaatggcagtataattcccctctggtcccgcgtaatgctgaattcggggaccggaaaggaaaagttcacattccatttcctctggcaaatgtgacatgcagggtgcctaaagcaagaaaccccaccgtgacgtacggaaaaaaccaagtcatcatgttgctgtatcctgaccacccaacgctcctgtcctacaggaatatgggagaagaaccaaactatcaagaagagtgggtgacgcataagaaggagatcaggttaaccgtgccgactgaggggctcgaggtcacgtggggtaacaatgagccgtacaagtattggccgcagttatccacaaacggtacagcccacggccacccgcatgagataattctgtattattatgagctgtacccaactatgactgcggtagttttgtcagtggcctcgttcatactcctgtcgatggtgggtgtggcagtggggatgtgcatgtgtgcacgacgcagatgcattacaccgtacgaactgacaccaggagctaccgtccctttcctgcttagcctaatatgctgcattagaacagctaaagcggccacataccaggaggccgcggtatacctgtggaacgagcagcagcctttattttggatgcaagcccttattccgctggcagccctgattgtcctatgtaactgtctgagactcttaccatgctgttgtaaaatgttgacttttttagccgtactgagcgtcggtgcccacactgtgagcgcgtacgaacacgtaacagtgatcccgaacacggtgggagtaccgtataagactctagtcaacagaccgggctacagccccatggtattggagatggagcttctgtctgtcaccttggaaccaacgctatcgcttgattacatcacgtgcgagtataaaaccgttatcccgtctccgtacgtgaaatgctgcggtacagcagagtgtaaggacaagagcctacctgattacagctgtaaggtcttcaccggcgtctacccattcatgtggggcggcgcctactgcttctgcgacaccgaaaatacgcaattgagcgaagcacatgtggagaagtccgaatcatgcaaaacagaatttgcatcagcatacagggctcataccgcatccgcatcagctaagctccgcgtcctttaccaaggaaataatatcactgtggctgcttatgcaaacggcgaccatgccgtcacagttaaggacgctaaattcatagtggggccaatgtcttcagcctggacacctttcgacaataaaatcgtggtgtacaaaggcgacgtctacaacatggactacccgcccttcggcgcaggaagaccaggacaatttggcgacatccaaagtcgcacgcctgagagcgaagacgtctatgctaatacacaactggtactgcagagaccgtccgcgggtacggtgcacgtgccgtactctcaggcaccatctggcttcaagtattggctaaaagaacgaggggcgtcgctgcagcacacagcaccatttggctgtcaaatagcaacaaacccggtaagagcgatgaactgcgccgtagggaacatgcctatctccatcgacataccggacgcggcctttaccagggtcgtcgacgcgccatctttaacggacatgtcgtgtgaggtatcagcctgcacccattcctcagactttgggggcgtagccatcattaaatatgcagccagtaagaaaggcaagtgtgcagtgcactcgatgactaacgccgtcactattcgggaagctgaaatagaagtagaagggaactctcagttgcaaatctctttttcgacggccctagccagcgccgaatttcgcgtacaagtctgttctacacaagtacactgtgcagccgagtgccatccaccgaaagaccatatagtcaattacccggcgtcacacaccaccctcggggtccaagacatttccgctacggcgatgtcatgggtgcagaagatcacgggaggtgtgggactggttgtcgctgttgcagcactgatcctaatcgtggtgctatgcgtgtcgtttagcaggcactaacttgacaactaggtatgaaggcatacgcgtccctaaagagacacaccgcatatagctaggaatcaacagataagtatagatctaagggctgaacaacccctgaataacaaaatataaaaatcaacaaaaatcataaaatagaaaactagaaatagaagtaggtaagaaggtatatgtgtcccctaagagacacaccatatatagctaagaatcaatagataagcatagatcaaagggctgaacaacccctgaataataacaaaatataaaaaccaataaaaatcataaaatagaaaatcaacaaaaatcataaaatagaaaactagaaatagaagtaggtaagaaggtatatgtgtcccctaagagacacaccatatatagctaagaatcaatagataagcatagatcaaagggctgaacaacccctgaataataacaaaatataaaaaccaataaaaatcataaaatagaaaaccacaaatagaagtagttcaaagggctataaaacccctgaatagtaacaaaatataaaactaataaaaatcaaacgaataccataattggcaatcggaagagatgtaggtacttaagcttcttaaaagcagccgaactcgctttgagatgtaggcgtagcacaccgaactcttccataattctccgaacccacagggacgtaggagatgttcaaagtgactataaaaccctgaacagtaataaaatataaaattaataatgagtaccataattggcaaatggaagagacgtaggtactaagcttcttaaaagcagccgaactcactttgagatgtaggcatagcataccgaactcttccacaattctccgtacccatagggacgtaggagatgttattttgtttttaatatttcaaaaaaaaaaaaaaaaaaaaaaaaaaaaaaaaaaaaaaaaa

SEQ ID NO: 45 - DNA, 1186 bp, Artificial Sequence
  Synthetic sequence
atggctgcgtgagacacacgtagcctaccagtttcttactgctctactctgcaaagcaagagattaataacccatcatggattctgtgtacgtggatatagacgctgacagcgcctttttgaaggccctgcaacgtgcgtaccccatgtttgaggtggaacctaggcaggtcacatcaaatgaccatgctaatgctagagcgttctcgcatctagccataaaactaatagagcaggaaattgatcccgactcaaccatcctggatataggtagtgcgccagcaaggaggatgatgtcggacaggaagtaccactgcgtttgcccgatgcgcagcgcagaagatcccgagagactcgctaattatgcgagaaagctcgcatctgccgcaggaaaagtcctggacagaaacatttctggaaagatcggggacttacaagaggtgatggccgtgccagacacggagacgccaacattttgcctacacacagatgtctcatgtagacagagagcagacgtcgcgatataccaagacgtctatgctgtacatgcacccatcaacaaaaatcataaaatagaaaactagaaatagaagtaggtaagaaggtatatgtgtcccctaagagacacaccatatatagctaagaatcaatagataagcatagatcaaagggctgaacaacccctgaataataacaaaatataaaaaccaataaaaatcataaaatagaaaaccacaaatagaagtagttcaaagggctataaaacccctgaatagtaacaaaatataaaactaataaaaatcaaacgaataccataattggcaatcggaagagatgtaggtacttaagcttcttaaaagcagccgaactcgctttgagatgtaggcgtagcacaccgaactcttccataattctccgaacccacagggacgtaggagatgttcaaagtgactataaaaccctgaacagtaataaaatataaaattaataatgagtaccataattggcaaatggaagagacgtaggtactaagcttcttaaaagcagccgaactcactttgagatgtaggcatagcataccgaactcttccacaattctccgtacccatagggacgtaggagatgttattttgtttttaatatttcaaaaaaaaaaaaaaaaaaaaaaaaaaaaaaaaaaaaaaaaa

SEQ ID NO: 46 - DNA, 1106 bp, Artificial Sequence
  Synthetic sequence
atggctgcgtgagacacacgtagcctaccagtttcttactgctctactctgcaaagcaagagattaataacccatcatggattctgtgtacgtggatatagacgctgacagcgcctttttgaaggccctgcaacgtgcgtaccccatgtttgaggtggaacctaggcaggtcacatcaaatgaccatgctaatgctagagcgttctcgcatctagccataaaactaatagagcaggaaattgatcccgactcaaccatcctggatataggtagtgcgccagcaaggaggatgatgtcggacaggaagtaccactgcgtttgcccgatgcgcagcgcagaagatcccgagagactcgctaattatgcgagaaagctcgcatctgccgcaggaaaagtcctggacagaaacatttctggaaagatcggggacttacaagaggtgatggccgtgccagacacggagacgccaacattttgcctacacacagatgtctcatgtagacagagagcagacgtcgcgatataccaagacgtctatgctgtacatgcacccaatagctaagaatcaatagataagcatagatcaaagggctgaacaacccctgaataataacaaaatataaaaaccaataaaaatcataaaatagaaaaccacaaatagaagtagttcaaagggctataaaacccctgaatagtaacaaaatataaaactaataaaaatcaaacgaataccataattggcaatcggaagagatgtaggtacttaagcttcttaaaagcagccgaactcgctttgagatgtaggcgtagcacaccgaactcttccataattctccgaacccacagggacgtaggagatgttcaaagtgactataaaaccctgaacagtaataaaatataaaattaataatgagtaccataattggcaaatggaagagacgtaggtactaagcttcttaaaagcagccgaactcactttgagatgtaggcatagcataccgaactcttccacaattctccgtacccatagggacgtaggagatgttattttgtttttaatatttcaaaaaaaaaaaaaaaaaaaaaaaaaaaaaaaaaaaaaaaaa

SEQ ID NO: 47 - DNA, 9566 bp, Artificial Sequence
  Synthetic sequence
atggctgcgtgagacacacgtagcctaccagtttcttactgctctactctgcaaagcaagagattaataacccatcatggattctgtgtacgtggatatagacgctgacagcgcctttttgaaggccctgcaacgtgcgtaccccatgtttgaggtggaacctaggcaggtcacatcaaatgaccatgctaatgctagagcgttctcgcatctagccataaaactaatagagcaggaaattgatcccgactcaaccatcctggatataggtagtgcgccagcaaggaggatgatgtcggacaggaagtaccactgcgtttgcccgatgcgcagcgcagaagatcccgagagactcgctaattatgcgagaaagctcgcatctgccgcaggaaaagtcctggacagaaacatttctggaaagatcggggacttacaagaggtgatggccgtgccagacacggagacgccaacattttgcctacacacagatgtctcatgtagacagagagcagacgtcgcgatataccaagacgtctatgctgtacatgcacccacgtcgctatatcaccaggcgattaaaggagtccgagtggcgtactgggtagggttcgacacaaccccgttcatgtacaacgctatggcgggtgcctacccctcatactcgacaaattgggcggatgagcaggtactgaaggctaagaacataggattatgttcaacagacctgacagaaggtagacgaggcaaattgtctatcatgagagggaaaaagctaaaaccgtgcgaccgtgtgctgttctcagtagggtcaacgctttacccggaaagccgcatgctacttaagagctggcacctaccatcggtgttccatctaaagggcaagcttagcttcacatgccgctgtgacacagtggtttcgtgtgagggctacgtcgttaagagaataacgatgagcccaggcctttatggaaaaaccacggggtatgcggtaacccaccacgcagacggattcttgatgtgcaagactaccgacacggtagacggtgaaagagtgtcattctcggtgtgcacgtacgtgccggcgaccatttgtgatcaaatgaccggcatccttgctacagaagtcacgccggaggatgcacagaagctgttggtggggctgaaccagagaatagtggttaacggcagaacgcaacggaacacgaacaccatgaagaactacctgcttcccgtggtcgcccaggccttcagtaagtgggcgaaggagtgccggaaggacatggaagatgagaagcttttgggggtcagagaaagaacactgacctgctgctgtctgtgggcatttaagaagcagaaaacacacacggtctacaagaggcctgatacccagtcaatccagaaggttcaggccgaattcgacagctttgtagtaccaggcctgtggtcgtccgggttgtcaatcccgttgaggactagaatcaagtggctgttacgcaaggtgccgaaagcagacctgatcccatatagcggaaatgcccaagaagcccaggatgctgaaaaagaagcagaggaagaacgagaagcagaactgactcatgaggctctaccacccctacaggcagcacaggaagatgtccaggtcgaaatcgacgtggaacaacttgaggatagagctggtgctggaataatagagactccgagaggcgctattaaagttactgcccaactaacggaccacgtcgtgggggagtacctggtactttccccgcagaccgtattacgcagccagaagctcagcctgatccacgctttagcggagcaagtgaagacgtgtacgcatagcggacgagcagggaggtatgcggtcgaagcgtacgatggccgagtcctagtgccctcaggctatgcaatttcgcccgaagacttccagagtctaagcgaaagcgcaacgatggtgtacaacgaaagagagttcgtaaacagaaagttacaccacattgcgatgcacggaccagctctgaacactgacgaagagtcgtatgagcttgtgagggcagagaggacagaacacgagtacgtctacgacgtggaccagagaagatgctgcaagaaggaagaagctgcaggattggtactggtgggcgacttgactaatccgccctaccacgaattcgcatacgaagggctaaaaattcgccccgcttgtccatataaaattgcagtcataggagtcttcggggtaccaggatctggtaagtcagccattatcaagaacctagttaccaggcaagacctggtgactagcggaaagaaagaaaactgccaagaaatcagcaccgacgtgatgagacagagaggtctagaaatatctgcacgtacggttgattcgctgctcttgaatggatgcaatagaccagtcgacgtgttgtacgtagacgaggcgtttgcgtgccactctggaacgttacttgccttgatcgccttggtgagaccaagactgaaagttgtactttgtggtgacccgaagcagtgcggcttcttcaatatgatgcagatgaaagtcaactacaatcataacatctgcactcaagtgtaccacaaaagtatttccaggcggtgtacactgcctgtgactgccattgtgtcgtcgttgcattacgaaggcaaaatgcgcactacgaatgagtacaacatagagcagtgtccgaccgtacaagaaacagcggagacgcgtgacacagctatttcctttcgggcaccgccaagtatcaccgtggaactgagccatccaccgatctccttcggagcaccaagcgagacgttccccatcacatttggggacttcaacgatggagaaatcgaaagcttgtcttctgagctactaactttcggagacttcctacccggtgaagtggatgatttgacagatagcgactggtccacgtgctcagacacggacgacgagttatgactagacagggcaggtgggtatatattctcgtcggacaccggtccaggccatttacaacagaagtcggtacgccagtcagtgctgccggtaaacaccctggaggaagttcacgaggagaagtgttacccacctaagctggatgaattaaaggagcaactactacttaagaaactccaggagagtgcgtccacggccaatagaagcaggtatcaatcacgcaaagtggaaaatatgaaagcaacaatcatccagagactaaagagaggctgtaaactgtatttaatggcagagaccccgaaagtcccgacttatcggaccgtatacccggcgcctgtgtactcgcctccgatcaacgtccgattgtccaatcccgagtccgcagtggcagcatgtaatgagttcttagctagaaactacccaactgtttcatcataccaaatcaccgatgagtatgatgcatatctagacatggtggacgggtcggagagttgcttggaccgagcgacattcaatccgtcaaaacttaggagctacccgaaacaacatgcttatcacgcgccctctatcagaagcgctgtaccttccccattccagaacacactacagaatgtactggcagcagccacgaaaaggaactgcaacgtcacacagatgagggaattacccactttggactcagcagtattcaacgtggagtgttttaaaaaattcgcatgcaaccgagaatactgggaagaatttgctgccagccctatcaggataacgactgagaatctaacaacctatgtcactaaattaaaggggccaaaagcagcagcgttgcttgcaagaacccataatctgctgccgctgcaggatgtaccaatggataggttcacagtagatatgaaaagggacgtgaaggtaactcctggcacaaagcatacagaggaaaggcctaaggtgcaggttatacaggcggctgaacccttggcaacagcgtacctatgtggaattcacagagaattggttaggagattgaacgccgtcctcctacccaacgtgcatacactatttgacatgtctgccgaggacttcgatgccattatagccgcacactttaagccaggagacgccgttttagaaacggacatagcctcctttgataagagccaggatgattcacttgcgcttaccgccttaatgctgttagaagatttgggagtggatcactccttgttggacctgatagaggctgcttttggagagatttccagctgtcacctgccgacaggtacgcgcttcaagttcggcgctatgatgaaatccggtatgttcctaactctgttcgtcaacacattgttaaatatcaccatcgctagccgggtgttggaagatcgtctgacaaaatctgcatgcgcggccttcatcggcgacgacaacataatacatggtgtcgtctccgatgaattgatggcagccagatgcgctacttggatgaacatggaagtgaagatcatagatgcagttgtatcccagaaagctccctacttttgtggagggtttatactgcatgatactgtgacaggaacagcttgcagggtggcggacccgctaaaaaggttatttaaactgggcaaaccgttagcggcaggtgacgaacaagacgaagacagaaggcgggcgctggctgatgaagtaatcagatggcaacgaacagggctaatagatgagctggagaaagcggtgtactctaggtacgaagtgcagggtatatcagttgctgtaatgtccatggccacctttgcaagctccagatccaacttcgagaagctcagaggacccgtcataaccttgtacggcggtcctaaataggtacgcactacagctacctattttgcaaaagccgacagcaggtacctaaataccaatcagccataatggagtttatcccaacccaaactttctacaataggaggtaccagcctcgaccttggactccgcgccctactatccaagtcatcagacccagaccgcgtccgcaaaggaaggccgggcaacttgcccagctgatctcagcagttaataaactgacaatgcgcgtggtacctcaacagaagccgcgcaagaatcggaagaataagaagcaaaagcaaaagcagcaggcgccacgaaacaatacgaatcaaaagaagcagccccccaaaaagaaaccggttcaaaagaaaaagaagccgggccgcagagagagaatgtgcatgaaaatcgaaaatgattgcatcttcgaagtcaagcatgaaggtaaggtaacaggttacgcgtgcttggtaggggacaaagtaatgaagccagcacacgtaaaggggaccatcgataacgcggacctggccaaattggccttcaagcggtcatctaagtacgaccttgaatgcgcgcagatacccgtgcacatgaagtccgacgcttcgaagttcacccatgagaaaccggaggggtactacaactggcaccacggagcagtacagtactcaggaggccgattcaccatccctacaggtgcgggcaaaccaggggatagtggtagaccgatcttcgacaacaaggggcgcgtggtggccatagttttaggaggagctaatgaaggagcccgtacagccctctcggtggtgacctggaacaaagacatcgtcacgaaaatcacccctgagggggccgaagagtggagtctggccattccagttatgtgcctgctggcaaataccacgttcccctgctcccggcccccttgcacaccctgctgctacgaaaaagagccggagaaaaccttgcgcatgcttgaagacaatgtcatgagccccgggtactatcagctgctacaagcatccttaacatgttctccccgacgccagcggcgcagtattaaggaccacttcaatgtctataaagccacaagaccgtacctagctcactgtcccgactgtggagaagggcactcgtgccatagtcccgtagcgctagaacgcatcagaaacgaagcgacagacgggacgttgaaaatccaggtttccttgcaaatcggaataaagacggatgatagccatgattggaccaagctgcgttatatggacaatcacatgccagcagacgcagagcgggccgggctatttgtaagaacgtcagcaccgtgcacgattactggaacaatgggacacttcattctggcccgatgtccgaaaggagaaactctgacggtggggttcactgacggtaggaagatcagtcactcatgtacgcacccatttcaccatgaccctcctgtgataggccgggaaaaattccattcccgaccgcagcacggtagggaactaccttgcagcacgtacgcgcagagcaccgctgcaactgccgaggagatagaggtacacatgcccccagacaccccagatcgcacattaatgtcacaacagtccggcaatgtaaagatcacagtcaatagtcagacggtgcggtacaagtgcaattgtggtgactcaagtgaaggattaaccactacagataaagtgattaataactgcaaggtcgatcaatgccatgccgcggtcaccaatcacaaaaaatggcagtataattcccctctggtcccgcgtaatgctgaattcggggaccggaaaggaaaagttcacattccatttcctctggcaaatgtgacatgcagggtgcctaaagcaagaaaccccaccgtgacgtacggaaaaaaccaagtcatcatgttgctgtatcctgaccacccaacgctcctgtcctacaggaatatgggagaagaaccaaactatcaagaagagtgggtgacgcataagaaggagatcaggttaaccgtgccgactgaggggctcgaggtcacgtggggtaacaatgagccgtacaagtattggccgcagttatccacaaacggtacagcccacggccacccgcatgagataattctgtattattatgagctgtacccaactatgactgcggtagttttgtcagtggcctcgttcatactcctgtcgatggtgggtgtggcagtggggatgtgcatgtgtgcacgacgcagatgcattacaccgtacgaactgacaccaggagctaccgtccctttcctgcttagcctaatatgctgcattagaacagctaaagcggccacataccaggaggccgcggtatacctgtggaacgagcagcagcctttattttggatgcaagcccttattccgctggcagccctgattgtcctatgtaactgtctgagactcttaccatgctgttgtaaaatgttgacttttttagccgtactgagcgtcggtgcccacactgtgagcgcgtacgaacacgtaacagtgatcccgaacacggtgggagtaccgtataagactctagtcaacagaccgggctacagccccatggtattggagatggagcttctgtctgtcaccttggaaccaacgctatcgcttgattacatcacgtgcgagtataaaaccgttatcccgtctccgtacgtgaaatgctgcggtacagcagagtgtaaggacaagagcctacctgattacagctgtaaggtcttcaccggcgtctacccattcatgtggggcggcgcctactgcttctgcgacaccgaaaatacgcaattgagcgaagcacatgtggagaagtccgaatcatgcaaaacagaatttgcatcagcatacagggctcataccgcatccgcatcagctaagctccgcgtcctttaccaaggaaataatatcactgtggctgcttatgcaaacggcgaccatgccgtcacagttaaggacgctaaattcatagtggggccaatgtcttcagcctggacacctttcgacaataaaatcgtggtgtacaaaggcgacgtctacaacatggactacccgcccttcggcgcaggaagaccaggacaatttggcgacatccaaagtcgcacgcctgagagcgaagacgtctatgctaatacacaactggtactgcagagaccgtccgcgggtacggtgcacgtgccgtactctcaggcaccatctggcttcaagtattggctaaaagaacgaggggcgtcgctgcagcacacagcaccatttggctgtcaaatagcaacaaacccggtaagagcgatgaactgcgccgtagggaacatgcctatctccatcgacataccggacgcggcctttaccagggtcgtcgacgcgccatctttaacggacatgtcgtgtgaggtatcagcctgcacccattcctcagactttgggggcgtagccatcattaaatatgcagccagtaagaaaggcaagtgtgcagtgcactcgatgactaacgccgtcactattcgggaagctgaaatagaagtagaagggaactctcagttgcaaatctctttttcgacggccctagccagcgccgaatttcgcgtacaagtctgttctacacaagtacactgtgcagccgagtgccatccaccgaaagaccatatagtcaattacccggcgtcacacaccaccctcggggtccaagacatttccgctacggcgatgtcatgggtgcagaagatcacgggaggtgtgggactggttgtcgctgttgcagcactgatcctaatcgtggtgctatgcgtgtcgtttagcaggcactaacttgacaactaggtatgaaggcatacgcgtccctaaagagacacaccgcatatagctaggaatcaacagataagtatagatctaagggctgaacaacccctgaataacaaaatataaaaatcaacaaaaatcataaaatagaaaactagaaatagaagtaggtaagaaggtatatgtgtcccctaagagacacaccatatatagctaagaatcaatagataagcatagatcaaagggctgaacaacccctgaataataacaaaatataaaaaccaataaaaatcataaaatagaaaatcaacaaaaatcataaaatagaaaactagaaatagaagtaggtaagaaggtatatgtgtcccctaagagacacaccatatatagctaagaatcaatagataagcatagatcaaagggctgaacaacccctgaataataacaaaatataaaaaccaataaaaatcataaaatagaaaaccacaaatagaagtagttcaaagggctataaaacccctgaatagtaacaaaatataaaactaataaaaatcaaacgaataccataattggcaatcggaagagatgtaggtacttaagcttcttaaaagcagccgaactcgctttgagatgtaggcgtagcacaccgaactcttccataattctccgaacccacagggacgtaggagatgttcaaagtgactataaaaccctgaacagtaataaaatataaaattaataatgagtaccataattggcaaatggaagagacgtaggtactaagcttcttaaaagcagccgaactcactttgagatgtaggcatagcataccgaactcttccacaattctccgtacccatagggacgtaggagatgttattttgtttttaatatttcaaaaaaaaaaaaaaaaaaaaaaaaaaaaaaaaaaaaaaaaa

SEQ ID NO: 48 - DNA, 6389 bp, Artificial Sequence
  Synthetic sequence
atggctgcgtgagacacacgtagcctaccagtttcttactgctctactctgcaaagcaagagattaataacccatcatggattctgtgtacgtggatatagacgctgacagcgcctttttgaaggccctgcaacgtgcgtaccccatgtttgaggtggaacctaggcaggtcacatcaaatgaccatgctaatgctagagcgttctcgcatctagccataaaactaatagagcaggaaattgatcccgactcaaccatcctggatataggtagtgcgccagcaaggaggatgatgtcggacaggaagtaccactgcgtttgcccgatgcgcagcgcagaagatcccgagagactcgctaattatgcgagaaagctcgcatctgccgcaggaaaagtcctggacagaaacatttctggaaagatcggggacttacaagaggtgatggccgtgccagacacggagacgccaacattttgcctacacacagatgtctcatgtagacagagagcagacgtcgcgatataccaagacgtctatgctgtacatgcacccacgtcgctatatcaccaggcgattaaaggagtccgagtggcgtactgggtagggttcgacacaaccccgttcatgtacaacgctatggcgggtgcctacccctcatactcgacaaattgggcggatgagcaggtactgaaggctaagaacataggattatgttcaacagacctgacagaaggtagacgaggcaaattgtctatcatgagagggaaaaagctaaaaccgtgcgaccgtgtgctgttctcagtagggtcaacgctttacccggaaagccgcatgctacttaagagctggcacctaccatcggtgttccatctaaagggcaagcttagcttcacatgccgctgtgacacagtggtttcgtgtgagggctacgtcgttaagagaataacgatgagcccaggcctttatggaaaaaccacggggtatgcggtaacccaccacgcagacggattcttgatgtgcaagactaccgacacggtagacggtgaaagagtgtcattctcggtgtgcacgtacgtgccggcgaccatttgtgatcaaatgaccggcatccttgctacagaagtcacgccggaggatgcacagaagctgttggtggggctgaaccagagaatagtggttaacggcagaacgcaacggaacacgaacaccatgaagaactacctgcttcccgtggtcgcccaggccttcagtaagtgggcgaaggagtgccggaaggacatggaagatgagaagcttttgggggtcagagaaagaacactgacctgctgctgtctgtgggcatttaagaagcagaaaacacacacggtctacaagaggcctgatacccagtcaatccagaaggttcaggccgaattcgacagctttgtagtaccaggcctgtggtcgtccgggttgtcaatcccgttgaggactagaatcaagtggctgttacgcaaggtgccgaaagcagacctgatcccatatagcggaaatgcccaagaagcccaggatgctgaaaaagaagcagaggaagaacgagaagcagaactgactcatgaggctctaccacccctacaggcagcacaggaagatgtccaggtcgaaatcgacgtggaacaacttgaggatagagctggtgctggaataatagagactccgagaggcgctattaaagttactgcccaactaacggaccacgtcgtgggggagtacctggtactttccccgcagaccgtattacgcagccagaagctcagcctgatccacgctttagcggagcaagtgaagacgtgtacgcatagcggacgagcagggaggtatgcggtcgaagcgtacgatggccgagtcctagtgccctcaggctatgcaatttcgcccgaagacttccagagtctaagcgaaagcgcaacgatggtgtacaacgaaagagagttcgtaaacagaaagttacaccacattgcgatgcacggaccagctctgaacactgacgaagagtcgtatgagcttgtgagggcagagaggacagaacacgagtacgtctacgacgtggaccagagaagatgctgcaagaaggaagaagctgcaggattggtactggtgggcgacttgactaatccgccctaccacgaattcgcatacgaagggctaaaaattcgccccgcttgtccatataaaattgcagtcataggagtcttcggggtaccaggatctggtaagtcagccattatcaagaacctagttaccaggcaagacctggtgactagcggaaagaaagaaaactgccaagaaatcagcaccgacgtgatgagacagagaggtctagaaatatctgcacgtacggttgattcgctgctcttgaatggatgcaatagaccagtcgacgtgttgtacgtagacgaggcgtttgcgtgccactctggaacgttacttgccttgatcgccttggtgagaccaagactgaaagttgtactttgtggtgacccgaagcagtgcggcttcttcaatatgatgcagatgaaagtcaactacaatcataacatctgcactcaagtgtaccacaaaagtatttccaggcggtgtacactgcctgtgactgccattgtgtcgtcgttgcattacgaaggcaaaatgcgcactacgaatgagtacaacatgccgattgtagtggacactacgggctcaacaaaacctgaccctggagacctcgtgttaacgtgcttcagagggtgggttaaacaactgcaaattgactatcgtggacacgaggtcatgacagcagccgcatcccaagggttaaccagaaaaggagtttacgcagttaggcaaaaagttaacgaaaacccactctatgcatcaacatcagagcacgtcaacgtactcctaacgcgtacggaaggtaaactggtatggaagacactctctggtgacccgtggataaagacgctgcagaacccaccgaaaggaaacttcaaggcaactattaaggagtgggaggtggagcacgcatcgataatggcgggcatctgcagtcaccaagtgacctttgacacgttccaaaacaaagccaacgtttgctgggctaagagcttggtccctatcctcgaaacagcggggataaaactaaatgataggcagtggtcccagataattcaagctttcaaagaagacaaagcatactcacccgaagtagccctgaatgaaatatgcacgcgcatgtatggggtggatctagacagcgggctattctctaaaccgttggtatctgtgtattacgcggataaccactgggataataggccgggaggaaagatgttcggattcaaccctgaggcagcgtccattctagaaagaaagtacccgtttacaaaaggaaagtggaacatcaacaagcagatctgcgtgactaccaggaggatagaagacttcaaccctaccaccaacattataccggccaacaggagactaccacactcattagtggccgaacaccgcccagtaaaaggggaaagaatggaatggctggttaacaagataaacggacatcatgtgctcctggttagcggctataaccttgcactgcctactaagagagtcacctgggtagcgccactaggtgtccgcggagcggactatacatacaacctagagctgggtctaccggcaacacttggtaggtatgacctagtggtcataaacatccacacaccttttcgcatacaccattaccaacagtgcgtagatcacgcaatgaaactgcaaatgctaggaggtgactcactgagactgctcaaaccgggtggctctctattgatcagagcatacggttacgcagatagaaccagtgaacgagtaatctgcgtactgggacgtaagtttagatcgtccagagcattgaaaccaccatgtatcaccagtaatactgagatgttcttcctatttagcagttttgacaatggcagaaggaattttacaacgcatgttatgaacaatcaactgaacgcagcctttgtaggacaggccacccgagcaggatgtgcaccatcgtaccgggtaaagcgcatggacatcgcgaagaacgatgaagagtgcgtggtcaacgccgccaaccctcgcgggttaccgggtgacggtgtttgcaaggcagtatataaaaaatggccggagtcctttaaaaatagtgcaacaccagtaggaaccgcaaaaacagttatgtgcggtacatatccagtaatccatgccgtaggaccaaacttctcaaattacacggagtccgaaggggaccgggaattggcggctgcctatcgagaagtcgcaaaggaagtaactagactgggagtaaatagcgtagctatacctctcctctccacaggtgtatactcaggagggaaagacaggctaacccagtcactgaaccacctctttacagccatggactcgacggatgcagacgtggtcatctactgccgagacaaggaatgggagaagaaaatatctgaggccatacagatgcggacccaagtggagctgctggatgagcacatctccatagactgcgatgtcattcgcgtgcaccctgacagtagtttggcaggtagaaaaggatacagcaccacggaaggcgcactgtattcatatctagaagggacacgttttcaccagacggcagtggatgtggcagagatacatactatgtggccaaagcaaatagaggccaatgagcaagtctgcctatatgccctgggggaaagtattgagtcaatcaggcagaaatgcccggtggatgatgcagatgcatcatctcccccgaaaaccgtcccgtgcctttgccgttatgccatgactcctgaacgcgtcacccgacttcgcatgaaccatgtcacaaatataattgtgtgttcttcatttccccttccaaagtacaagatagaaggagtgcaaaaagtcaaatgctccaaggtaatgttatttgatcacaatgtgccatcgcgcgtaagtccaagggaatacagatcttcccaggagtctgtacgggaagtgagtatgacaacgtcattgacgcatagtcagtttgatctaagcgccgatggcgagacactgcccgtcccgtcagacctggatgctgacgccccagccctagaaccggccctagacgacggggcgatacatacgaccggaaaccttgcggccgtgtctgactgggtaatgagcaccgtacccgtcgcgccgcctagaagaaggagagggagaaacctgaccgtgatatgtgacgagagagaagggaatataacacccatggctagcgtccgattctttagagcagagcagtgtccgaccgtacaagaaacagcggagacgcgtgacacagctatttcctttcgggcaccgccaagtatcaccgtggaactgagccatccaccgatctccttcggagcaccaagcgagacgttccccatcacatttggggacttcaacgatggagaaatcgaaagcttgtcttctgagctactaactttcggagacttcctacccggtgaagtggatgatttgacagatagcgactggtccacgtgctcagacacggacgacgaggtatatgtgtcccctaagagacacaccatatatagctaagaatcaatagataagcatagatcaaagggctgaacaacccctgaataataacaaaatataaaaaccaataaaaatcataaaatagaaaatcaacaaaaatcataaaatagaaaactagaaatagaagtaggtaagaaggtatatgtgtcccctaagagacacaccatatatagctaagaatcaatagataagcatagatcaaagggctgaacaacccctgaataataacaaaatataaaaaccaataaaaatcataaaatagaaaaccacaaatagaagtagttcaaagggctataaaacccctgaatagtaacaaaatataaaactaataaaaatcaaacgaataccataattggcaatcggaagagatgtaggtacttaagcttcttaaaagcagccgaactcgctttgagatgtaggcgtagcacaccgaactcttccataattctccgaacccacagggacgtaggagatgttcaaagtgactataaaaccctgaacagtaataaaatataaaattaataatgagtaccataattggcaaatggaagagacgtaggtactaagcttcttaaaagcagccgaactcactttgagatgtaggcatagcataccgaactcttccacaattctccgtacccatagggacgtaggagatgttattttgtttttaatatttcaaaaaaaaaaaaaaaaaaaaaaaaaaaaaaaaaaaaaaaaa

SEQ ID NO: 49 - DNA, 6598 bp, Artificial Sequence
  Synthetic sequence
atggctgcgtgagacacacgtagcctaccagtttcttactgctctactctgcaaagcaagagattaataacccatcatggattctgtgtacgtggatatagacgctgacagcgcctttttgaaggccctgcaacgtgcgtaccccatgtttgaggtggaacctaggcaggtcacatcaaatgaccatgctaatgctagagcgttctcgcatctagccataaaactaatagagcaggaaattgatcccgactcaaccatcctggatataggtagtgcgccagcaaggaggatgatgtcggacaggaagtaccactgcgtttgcccgatgcgcagcgcagaagatcccgagagactcgctaattatgcgagaaagctcgcatctgccgcaggaaaagtcctggacagaaacatttctggaaagatcggggacttacaagaggtgatggccgtgccagacacggagacgccaacattttgcctacacacagatgtctcatgtagacagagagcagacgtcgcgatataccaagacgtctatgctgtacatgcacccacgtcgctatatcaccaggcgattaaaggagtccgagtggcgtactgggtagggttcgacacaaccccgttcatgtacaacgctatggcgggtgcctacccctcatactcgacaaattgggcggatgagcaggtactgaaggctaagaacataggattatgttcaacagacctgacagaaggtagacgaggcaaattgtctatcatgagagggaaaaagctaaaaccgtgcgaccgtgtgctgttctcagtagggtcaacgctttacccggaaagccgcatgctacttaagagctggcacctaccatcggtgttccatctaaagggcaagcttagcttcacatgccgctgtgacacagtggtttcgtgtgagggctacgtcgttaagagaataacgatgagcccaggcctttatggaaaaaccacggggtatgcggtaacccaccacgcagacggattcttgatgtgcaagactaccgacacggtagacggtgaaagagtgtcattctcggtgtgcacgtacgtgccggcgaccatttgtgatcaaatgaccggcatccttgctacagaagtcacgccggaggatgcacagaagctgttggtggggctgaaccagagaatagtggttaacggcagaacgcaacggaacacgaacaccatgaagaactacctgcttcccgtggtcgcccaggccttcagtaagtgggcgaaggagtgccggaaggacatggaagatgagaagcttttgggggtcagagaaagaacactgacctgctgctgtctgtgggcatttaagaagcagaaaacacacacggtctacaagaggcctgatacccagtcaatccagaaggttcaggccgaattcgacagctttgtagtaccaggcctgtggtcgtccgggttgtcaatcccgttgaggactagaatcaagtggctgttacgcaaggtgccgaaagcagacctgatcccatatagcggaaatgcccaagaagcccaggatgctgaaaaagaagcagaggaagaacgagaagcagaactgactcatgaggctctaccacccctacaggcagcacaggaagatgtccaggtcgaaatcgacgtggaacaacttgaggatagagctggtgctggaataatagagactccgagaggcgctattaaagttactgcccaactaacggaccacgtcgtgggggagtacctggtactttccccgcagaccgtattacgcagccagaagctcagcctgatccacgctttagcggagcaagtgaagacgtgtacgcatagcggacgagcagggaggtatgcggtcgaagcgtacgatggccgagtcctagtgccctcaggctatgcaatttcgcccgaagacttccagagtctaagcgaaagcgcaacgatggtgtacaacgaaagagagttcgtaaacagaaagttacaccacattgcgatgcacggaccagctctgaacactgacgaagagtcgtatgagcttgtgagggcagagaggacagaacacgagtacgtctacgacgtggaccagagaagatgctgcaagaaggaagaagctgcaggattggtactggtgggcgacttgactaatccgccctaccacgaattcgcatacgaagggctaaaaattcgccccgcttgtccatataaaattgcagtcataggagtcttcggggtaccaggatctggtaagtcagccattatcaagaacctagttaccaggcaagacctggtgactagcggaaagaaagaaaactgccaagaaatcagcaccgacgtgatgagacagagaggtctagaaatatctgcacgtacggttgattcgctgctcttgaatggatgcaatagaccagtcgacgtgttgtacgtagacgaggcgtttgcgtgccactctggaacgttacttgccttgatcgccttggtgagaccaagactgaaagttgtactttgtggtgacccgaagcagtgcggcttcttcaatatgatgcagatgaaagtcaactacaatcataacatctgcactcaagtgtaccacaaaagtatttccaggcggtgtacactgcctgtgactgccattgtgtcgtcgttgcattacgaaggcaaaatgcgcactacgaatgagtacaacatgccgattgtagtggacactacgggctcaacaaaacctgaccctggagacctcgtgttaacgtgcttcagagggtgggttaaacaactgcaaattgactatcgtggacacgaggtcatgacagcagccgcatcccaagggttaaccagaaaaggagtttacgcagttaggcaaaaagttaacgaaaacccactctatgcatcaacatcagagcacgtcaacgtactcctaacgcgtacggaaggtaaactggtatggaagacactctctggtgacccgtggataaagacgctgcagaacccaccgaaaggaaacttcaaggcaactattaaggagtgggaggtggagcacgcatcgataatggcgggcatctgcagtcaccaagtgacctttgacacgttccaaaacaaagccaacgtttgctgggctaagagcttggtccctatcctcgaaacagcggggataaaactaaatgataggcagtggtcccagataattcaagctttcaaagaagacaaagcatactcacccgaagtagccctgaatgaaatatgcacgcgcatgtatggggtggatctagacagcgggctattctctaaaccgttggtatctgtgtattacgcggataaccactgggataataggccgggaggaaagatgttcggattcaaccctgaggcagcgtccattctagaaagaaagtacccgtttacaaaaggaaagtggaacatcaacaagcagatctgcgtgactaccaggaggatagaagacttcaaccctaccaccaacattataccggccaacaggagactaccacactcattagtggccgaacaccgcccagtaaaaggggaaagaatggaatggctggttaacaagataaacggacatcatgtgctcctggttagcggctataaccttgcactgcctactaagagagtcacctgggtagcgccactaggtgtccgcggagcggactatacatacaacctagagctgggtctaccggcaacacttggtaggtatgacctagtggtcataaacatccacacaccttttcgcatacaccattaccaacagtgcgtagatcacgcaatgaaactgcaaatgctaggaggtgactcactgagactgctcaaaccgggtggctctctattgatcagagcatacggttacgcagatagaaccagtgaacgagtaatctgcgtactgggacgtaagtttagatcgtccagagcattgaaaccaccatgtatcaccagtaatactgagatgttcttcctatttagcagttttgacaatggcagaaggaattttacaacgcatgttatgaacaatcaactgaacgcagcctttgtaggacaggccacccgagcaggatgtgcaccatcgtaccgggtaaagcgcatggacatcgcgaagaacgatgaagagtgcgtggtcaacgccgccaaccctcgcgggttaccgggtgacggtgtttgcaaggcagtatataaaaaatggccggagtcctttaaaaatagtgcaacaccagtaggaaccgcaaaaacagttatgtgcggtacatatccagtaatccatgccgtaggaccaaacttctcaaattacacggagtccgaaggggaccgggaattggcggctgcctatcgagaagtcgcaaaggaagtaactagactgggagtaaatagcgtagctatacctctcctctccacaggtgtatactcaggagggaaagacaggctaacccagtcactgaaccacctctttacagccatggactcgacggatgcagacgtggtcatctactgccgagacaaggaatgggagaagaaaatatctgaggccatacagatgcggacccaagtggagctgctggatgagcacatctccatagactgcgatgtcattcgcgtgcaccctgacagtagtttggcaggtagaaaaggatacagcaccacggaaggcgcactgtattcatatctagaagggacacgttttcaccagacggcagtggatgtggcagagatacatactatgtggccaaagcaaatagaggccaatgagcaagtctgcctatatgccctgggggaaagtattgagtcaatcaggcagaaatgcccggtggatgatgcagatgcatcatctcccccgaaaaccgtcccgtgcctttgccgttatgccatgactcctgaacgcgtcacccgacttcgcatgaaccatgtcacaaatataattgtgtgttcttcatttccccttccaaagtacaagatagaaggagtgcaaaaagtcaaatgctccaaggtaatgttatttgatcacaatgtgccatcgcgcgtaagtccaagggaatacagatcttcccaggagtctgtacgggaagtgagtatgacaacgtcattgacgcatagtcagtttgatctaagcgccgatggcgagacactgcccgtcccgtcagacctggatgctgacgccccagccctagaaccggccctagacgacggggcgatacatacgaccggaaaccttgcggccgtgtctgactgggtaatgagcaccgtacccgtcgcgccgcctagaagaaggagagggagaaacctgaccgtgatatgtgacgagagagaagggaatataacacccatggctagcgtccgattctttagagcagagcagtgtccgaccgtacaagaaacagcggagacgcgtgacacagctatttcctttcgggcaccgccaagtatcaccgtggaactgagccatccaccgatctccttcggagcaccaagcgagacgttccccatcacatttggggacttcaacgatggagaaatcgaaagcttgtcttctgagctactaactttcggagacttcctacccggtgaagtggatgatttgacagatagcgactggtccacgtgctcagacacggacgacgagttatgactagacagggcaggtgggtatatattctcgtcggacaccggtccaggccatttacaacagaagtcggtacgccagtcagtgctgccggtaaacaccctggaggaagttcacgaggagaagtgttacccacctaagctggatgaattaaaggagcaactactacttaagaaactccaggagagtgcgtccacggccaatagaagcaggtatcaatcacgcaaagtggaaaatatgaaagcaacaatcatccagagactaaaggatcaaagggctgaacaacccctgaataataacaaaatataaaaaccaataaaaatcataaaatagaaaatcaacaaaaatcataaaatagaaaactagaaatagaagtaggtaagaaggtatatgtgtcccctaagagacacaccatatatagctaagaatcaatagataagcatagatcaaagggctgaacaacccctgaataataacaaaatataaaaaccaataaaaatcataaaatagaaaaccacaaatagaagtagttcaaagggctataaaacccctgaatagtaacaaaatataaaactaataaaaatcaaacgaataccataattggcaatcggaagagatgtaggtacttaagcttcttaaaagcagccgaactcgctttgagatgtaggcgtagcacaccgaactcttccataattctccgaacccacagggacgtaggagatgttcaaagtgactataaaaccctgaacagtaataaaatataaaattaataatgagtaccataattggcaaatggaagagacgtaggtactaagcttcttaaaagcagccgaactcactttgagatgtaggcatagcataccgaactcttccacaattctccgtacccatagggacgtaggagatgttattttgtttttaatatttcaaaaaaaaaaaaaaaaaaaaaaaaaaaaaaaaaaaaaaaaa

SEQ ID NO: 50 - DNA, 6628 bp, Artificial Sequence
  Synthetic sequence
atggctgcgtgagacacacgtagcctaccagtttcttactgctctactctgcaaagcaagagattaataacccatcatggattctgtgtacgtggatatagacgctgacagcgcctttttgaaggccctgcaacgtgcgtaccccatgtttgaggtggaacctaggcaggtcacatcaaatgaccatgctaatgctagagcgttctcgcatctagccataaaactaatagagcaggaaattgatcccgactcaaccatcctggatataggtagtgcgccagcaaggaggatgatgtcggacaggaagtaccactgcgtttgcccgatgcgcagcgcagaagatcccgagagactcgctaattatgcgagaaagctcgcatctgccgcaggaaaagtcctggacagaaacatttctggaaagatcggggacttacaagaggtgatggccgtgccagacacggagacgccaacattttgcctacacacagatgtctcatgtagacagagagcagacgtcgcgatataccaagacgtctatgctgtacatgcacccacgtcgctatatcaccaggcgattaaaggagtccgagtggcgtactgggtagggttcgacacaaccccgttcatgtacaacgctatggcgggtgcctacccctcatactcgacaaattgggcggatgagcaggtactgaaggctaagaacataggattatgttcaacagacctgacagaaggtagacgaggcaaattgtctatcatgagagggaaaaagctaaaaccgtgcgaccgtgtgctgttctcagtagggtcaacgctttacccggaaagccgcatgctacttaagagctggcacctaccatcggtgttccatctaaagggcaagcttagcttcacatgccgctgtgacacagtggtttcgtgtgagggctacgtcgttaagagaataacgatgagcccaggcctttatggaaaaaccacggggtatgcggtaacccaccacgcagacggattcttgatgtgcaagactaccgacacggtagacggtgaaagagtgtcattctcggtgtgcacgtacgtgccggcgaccatttgtgatcaaatgaccggcatccttgctacagaagtcacgccggaggatgcacagaagctgttggtggggctgaaccagagaatagtggttaacggcagaacgcaacggaacacgaacaccatgaagaactacctgcttcccgtggtcgcccaggccttcagtaagtgggcgaaggagtgccggaaggacatggaagatgagaagcttttgggggtcagagaaagaacactgacctgctgctgtctgtgggcatttaagaagcagaaaacacacacggtctacaagaggcctgatacccagtcaatccagaaggttcaggccgaattcgacagctttgtagtaccaggcctgtggtcgtccgggttgtcaatcccgttgaggactagaatcaagtggctgttacgcaaggtgccgaaagcagacctgatcccatatagcggaaatgcccaagaagcccaggatgctgaaaaagaagcagaggaagaacgagaagcagaactgactcatgaggctctaccacccctacaggcagcacaggaagatgtccaggtcgaaatcgacgtggaacaacttgaggatagagctggtgctggaataatagagactccgagaggcgctattaaagttactgcccaactaacggaccacgtcgtgggggagtacctggtactttccccgcagaccgtattacgcagccagaagctcagcctgatccacgctttagcggagcaagtgaagacgtgtacgcatagcggacgagcagggaggtatgcggtcgaagcgtacgatggccgagtcctagtgccctcaggctatgcaatttcgcccgaagacttccagagtctaagcgaaagcgcaacgatggtgtacaacgaaagagagttcgtaaacagaaagttacaccacattgcgatgcacggaccagctctgaacactgacgaagagtcgtatgagcttgtgagggcagagaggacagaacacgagtacgtctacgacgtggaccagagaagatgctgcaagaaggaagaagctgcaggattggtactggtgggcgacttgactaatccgccctaccacgaattcgcatacgaagggctaaaaattcgccccgcttgtccatataaaattgcagtcataggagtcttcggggtaccaggatctggtaagtcagccattatcaagaacctagttaccaggcaagacctggtgactagcggaaagaaagaaaactgccaagaaatcagcaccgacgtgatgagacagagaggtctagaaatatctgcacgtacggttgattcgctgctcttgaatggatgcaatagaccagtcgacgtgttgtacgtagacgaggcgtttgcgtgccactctggaacgttacttgccttgatcgccttggtgagaccaagactgaaagttgtactttgtggtgacccgaagcagtgcggcttcttcaatatgatgcagatgaaagtcaactacaatcataacatctgcactcaagtgtaccacaaaagtatttccaggcggtgtacactgcctgtgactgccattgtgtcgtcgttgcattacgaaggcaaaatgcgcactacgaatgagtacaacatgccgattgtagtggacactacgggctcaacaaaacctgaccctggagacctcgtgttaacgtgcttcagagggtgggttaaacaactgcaaattgactatcgtggacacgaggtcatgacagcagccgcatcccaagggttaaccagaaaaggagtttacgcagttaggcaaaaagttaacgaaaacccactctatgcatcaacatcagagcacgtcaacgtactcctaacgcgtacggaaggtaaactggtatggaagacactctctggtgacccgtggataaagacgctgcagaacccaccgaaaggaaacttcaaggcaactattaaggagtgggaggtggagcacgcatcgataatggcgggcatctgcagtcaccaagtgacctttgacacgttccaaaacaaagccaacgtttgctgggctaagagcttggtccctatcctcgaaacagcggggataaaactaaatgataggcagtggtcccagataattcaagctttcaaagaagacaaagcatactcacccgaagtagccctgaatgaaatatgcacgcgcatgtatggggtggatctagacagcgggctattctctaaaccgttggtatctgtgtattacgcggataaccactgggataataggccgggaggaaagatgttcggattcaaccctgaggcagcgtccattctagaaagaaagtacccgtttacaaaaggaaagtggaacatcaacaagcagatctgcgtgactaccaggaggatagaagacttcaaccctaccaccaacattataccggccaacaggagactaccacactcattagtggccgaacaccgcccagtaaaaggggaaagaatggaatggctggttaacaagataaacggacatcatgtgctcctggttagcggctataaccttgcactgcctactaagagagtcacctgggtagcgccactaggtgtccgcggagcggactatacatacaacctagagctgggtctaccggcaacacttggtaggtatgacctagtggtcataaacatccacacaccttttcgcatacaccattaccaacagtgcgtagatcacgcaatgaaactgcaaatgctaggaggtgactcactgagactgctcaaaccgggtggctctctattgatcagagcatacggttacgcagatagaaccagtgaacgagtaatctgcgtactgggacgtaagtttagatcgtccagagcattgaaaccaccatgtatcaccagtaatactgagatgttcttcctatttagcagttttgacaatggcagaaggaattttacaacgcatgttatgaacaatcaactgaacgcagcctttgtaggacaggccacccgagcaggatgtgcaccatcgtaccgggtaaagcgcatggacatcgcgaagaacgatgaagagtgcgtggtcaacgccgccaaccctcgcgggttaccgggtgacggtgtttgcaaggcagtatataaaaaatggccggagtcctttaaaaatagtgcaacaccagtaggaaccgcaaaaacagttatgtgcggtacatatccagtaatccatgccgtaggaccaaacttctcaaattacacggagtccgaaggggaccgggaattggcggctgcctatcgagaagtcgcaaaggaagtaactagactgggagtaaatagcgtagctatacctctcctctccacaggtgtatactcaggagggaaagacaggctaacccagtcactgaaccacctctttacagccatggactcgacggatgcagacgtggtcatctactgccgagacaaggaatgggagaagaaaatatctgaggccatacagatgcggacccaagtggagctgctggatgagcacatctccatagactgcgatgtcattcgcgtgcaccctgacagtagtttggcaggtagaaaaggatacagcaccacggaaggcgcactgtattcatatctagaagggacacgttttcaccagacggcagtggatgtggcagagatacatactatgtggccaaagcaaatagaggccaatgagcaagtctgcctatatgccctgggggaaagtattgagtcaatcaggcagaaatgcccggtggatgatgcagatgcatcatctcccccgaaaaccgtcccgtgcctttgccgttatgccatgactcctgaacgcgtcacccgacttcgcatgaaccatgtcacaaatataattgtgtgttcttcatttccccttccaaagtacaagatagaaggagtgcaaaaagtcaaatgctccaaggtaatgttatttgatcacaatgtgccatcgcgcgtaagtccaagggaatacagatcttcccaggagtctgtacgggaagtgagtatgacaacgtcattgacgcatagtcagtttgatctaagcgccgatggcgagacactgcccgtcccgtcagacctggatgctgacgccccagccctagaaccggccctagacgacggggcgatacatacgaccggaaaccttgcggccgtgtctgactgggtaatgagcaccgtacccgtcgcgccgcctagaagaaggagagggagaaacctgaccgtgatatgtgacgagagagaagggaatataacacccatggctagcgtccgattctttagagcagagcagtgtccgaccgtacaagaaacagcggagacgcgtgacacagctatttcctttcgggcaccgccaagtatcaccgtggaactgagccatccaccgatctccttcggagcaccaagcgagacgttccccatcacatttggggacttcaacgatggagaaatcgaaagcttgtcttctgagctactaactttcggagacttcctacccggtgaagtggatgatttgacagatagcgactggtccacgtgctcagacacggacgacgagttatgactagacagggcaggtgggtatatattctcgtcggacaccggtccaggccatttacaacagaagtcggtacgccagtcagtgctgccggtaaacaccctggaggaagttcacgaggagaagtgttacccacctaagctggatgaattaaaggagcaactactacttaagaaactccaggagagtgcgtccacggccaatagaagcaggtatcaatcacgcaaagtggaaaatatgaaagcaacaatcatccagagactaaagagaggctgtaaactgtatttaatggcagagaccccgaaagtcccgacttatcggaccgtatacccggcgcctgtgtactcgcctccgatcaacgtccgattgtccaatcccgagtccgcagtggcagcatgtaatgagttcttagctagaaactacccaactgtttcatcataccaaatcaccgatgagtatgatgcatatctagacatggtggacgggtcggagagttgcttggaccgagcgacattcaatccgtcaaaacttaggagctacccgaaacaacatggaagtagttcaaagggctataaaacccctgaatagtaacaaaatataaaactaataaaaatcaaacgaataccataattggcaatcggaagagatgtaggtacttaagcttcttaaaagcagccgaactcgctttgagatgtaggcgtagcacaccgaactcttccataattctccgaacccacagggacgtaggagatgttcaaagtgactataaaaccctgaacagtaataaaatataaaattaataatgagtaccataattggcaaatggaagagacgtaggtactaagcttcttaaaagcagccgaactcactttgagatgtaggcatagcataccgaactcttccacaattctccgtacccatagggacgtaggagatgttattttgtttttaatatttcaaaaaaaaaaaaaaaaaaaaaaaaaaaaaaaaaaaaaaaaa

SEQ ID NO: 51 - DNA, 9138 bp, Artificial Sequence
  Synthetic sequence
atggctgcgtgagacacacgtagcctaccagtttcttactgctctactctgcaaagcaagagattaataacccatcatggattctgtgtacgtggatatagacgctgacagcgcctttttgaaggccctgcaacgtgcgtaccccatgtttgaggtggaacctaggcaggtcacatcaaatgaccatgctaatgctagagcgttctcgcatctagccataaaactaatagagcaggaaattgatcccgactcaaccatcctggatataggtagtgcgccagcaaggaggatgatgtcggacaggaagtaccactgcgtttgcccgatgcgcagcgcagaagatcccgagagactcgctaattatgcgagaaagctcgcatctgccgcaggaaaagtcctggacagaaacatttctggaaagatcggggacttacaagaggtgatggccgtgccagacacggagacgccaacattttgcctacacacagatgtctcatgtagacagagagcagacgtcgcgatataccaagacgtctatgctgtacatgcacccacgtcgctatatcaccaggcgattaaaggagtccgagtggcgtactgggtagggttcgacacaaccccgttcatgtacaacgctatggcgggtgcctacccctcatactcgacaaattgggcggatgagcaggtactgaaggctaagaacataggattatgttcaacagacctgacagaaggtagacgaggcaaattgtctatcatgagagggaaaaagctaaaaccgtgcgaccgtgtgctgttctcagtagggtcaacgctttacccggaaagccgcatgctacttaagagctggcacctaccatcggtgttccatctaaagggcaagcttagcttcacatgccgctgtgacacagtggtttcgtgtgagggctacgtcgttaagagaataacgatgagcccaggcctttatggaaaaaccacggggtatgcggtaacccaccacgcagacggattcttgatgtgcaagactaccgacacggtagacggtgaaagagtgtcattctcggtgtgcacgtacgtgccggcgaccatttgtgatcaaatgaccggcatccttgctacagaagtcacgccggaggatgcacagaagctgttggtggggctgaaccagagaatagtggttaacggcagaacgcaacggaacacgaacaccatgaagaactacctgcttcccgtggtcgcccaggccttcagtaagtgggcgaaggagtgccggaaggacatggaagatgagaagcttttgggggtcagagaaagaacactgacctgctgctgtctgtgggcatttaagaagcagaaaacacacacggtctacaagaggcctgatacccagtcaatccagaaggttcaggccgaattcgacagctttgtagtaccaggcctgtggtcgtccgggttgtcaatcccgttgaggactagaatcaagtggctgttacgcaaggtgccgaaagcagacctgatcccatatagcggaaatgcccaagaagcccaggatgctgaaaaagaagcagaggaagaacgagaagcagaactgactcatgaggctctaccacccctacaggcagcacaggaagatgtccaggtcgaaatcgacgtggaacaacttgaggatagagctggtgctggaataatagagactccgagaggcgctattaaagttactgcccaactaacggaccacgtcgtgggggagtacctggtactttccccgcagaccgtattacgcagccagaagctcagcctgatccacgctttagcggagcaagtgaagacgtgtacgcatagcggacgagcagggaggtatgcggtcgaagcgtacgatggccgagtcctagtgccctcaggctatgcaatttcgcccgaagacttccagagtctaagcgaaagcgcaacgatggtgtacaacgaaagagagttcgtaaacagaaagttacaccacattgcgatgcacggaccagctctgaacactgacgaagagtcgtatgagcttgtgagggcagagaggacagaacacgagtacgtctacgacgtggaccagagaagatgctgcaagaaggaagaagctgcaggattggtactggtgggcgacttgactaatccgccctaccacgaattcgcatacgaagggctaaaaattcgccccgcttgtccatataaaattgcagtcataggagtcttcggggtaccaggatctggtaagtcagccattatcaagaacctagttaccaggcaagacctggtgactagcggaaagaaagaaaactgccaagaaatcagcaccgacgtgatgagacagagaggtctagaaatatctgcacgtacggttgattcgctgctcttgaatggatgcaatagaccagtcgacgtgttgtacgtagacgaggcgtttgcgtgccactctggaacgttacttgccttgatcgccttggtgagaccaagactgaaagttgtactttgtggtgacccgaagcagtgcggcttcttcaatatgatgcagatgaaagtcaactacaatcataacatctgcactcaagtgtaccacaaaagtatttccaggcggtgtacactgcctgtgactgccattgtgtcgtcgttgcattacgaaggcaaaatgcgcactacgaatgagtacaacatgccgattgtagtggacactacgggctcaacaaaacctgaccctggagacctcgtgttaacgtgcttcagagggtgggttaaacaactgcaaattgactatcgtggacacgaggtcatgacagcagccgcatcccaagggttaaccagaaaaggagtttacgcagttaggcaaaaagttaacgaaaacccactctatgcatcaacatcagagcacgtcaacgtactcctaacgcgtacggaaggtaaactggtatggaagacactctctggtgacccgtggataaagacgctgcagaacccaccgaaaggaaacttcaaggcaactattaaggagtgggaggtggagcacgcatcgattcaatccgtcaaaacttaggagctacccgaaacaacatgcttatcacgcgccctctatcagaagcgctgtaccttccccattccagaacacactacagaatgtactggcagcagccacgaaaaggaactgcaacgtcacacagatgagggaattacccactttggactcagcagtattcaacgtggagtgttttaaaaaattcgcatgcaaccgagaatactgggaagaatttgctgccagccctatcaggataacgactgagaatctaacaacctatgtcactaaattaaaggggccaaaagcagcagcgttgcttgcaagaacccataatctgctgccgctgcaggatgtaccaatggataggttcacagtagatatgaaaagggacgtgaaggtaactcctggcacaaagcatacagaggaaaggcctaaggtgcaggttatacaggcggctgaacccttggcaacagcgtacctatgtggaattcacagagaattggttaggagattgaacgccgtcctcctacccaacgtgcatacactatttgacatgtctgccgaggacttcgatgccattatagccgcacactttaagccaggagacgccgttttagaaacggacatagcctcctttgataagagccaggatgattcacttgcgcttaccgccttaatgctgttagaagatttgggagtggatcactccttgttggacctgatagaggctgcttttggagagatttccagctgtcacctgccgacaggtacgcgcttcaagttcggcgctatgatgaaatccggtatgttcctaactctgttcgtcaacacattgttaaatatcaccatcgctagccgggtgttggaagatcgtctgacaaaatctgcatgcgcggccttcatcggcgacgacaacataatacatggtgtcgtctccgatgaattgatggcagccagatgcgctacttggatgaacatggaagtgaagatcatagatgcagttgtatcccagaaagctccctacttttgtggagggtttatactgcatgatactgtgacaggaacagcttgcagggtggcggacccgctaaaaaggttatttaaactgggcaaaccgttagcggcaggtgacgaacaagacgaagacagaaggcgggcgctggctgatgaagtaatcagatggcaacgaacagggctaatagatgagctggagaaagcggtgtactctaggtacgaagtgcagggtatatcagttgctgtaatgtccatggccacctttgcaagctccagatccaacttcgagaagctcagaggacccgtcataaccttgtacggcggtcctaaataggtacgcactacagctacctattttgcaaaagccgacagcaggtacctaaataccaatcagccataatggagtttatcccaacccaaactttctacaataggaggtaccagcctcgaccttggactccgcgccctactatccaagtcatcagacccagaccgcgtccgcaaaggaaggccgggcaacttgcccagctgatctcagcagttaataaactgacaatgcgcgtggtacctcaacagaagccgcgcaagaatcggaagaataagaagcaaaagcaaaagcagcaggcgccacgaaacaatacgaatcaaaagaagcagccccccaaaaagaaaccggttcaaaagaaaaagaagccgggccgcagagagagaatgtgcatgaaaatcgaaaatgattgcatcttcgaagtcaagcatgaaggtaaggtaacaggttacgcgtgcttggtaggggacaaagtaatgaagccagcacacgtaaaggggaccatcgataacgcggacctggccaaattggccttcaagcggtcatctaagtacgaccttgaatgcgcgcagatacccgtgcacatgaagtccgacgcttcgaagttcacccatgagaaaccggaggggtactacaactggcaccacggagcagtacagtactcaggaggccgattcaccatccctacaggtgcgggcaaaccaggggatagtggtagaccgatcttcgacaacaaggggcgcgtggtggccatagttttaggaggagctaatgaaggagcccgtacagccctctcggtggtgacctggaacaaagacatcgtcacgaaaatcacccctgagggggccgaagagtggagtctggccattccagttatgtgcctgctggcaaataccacgttcccctgctcccggcccccttgcacaccctgctgctacgaaaaagagccggagaaaaccttgcgcatgcttgaagacaatgtcatgagccccgggtactatcagctgctacaagcatccttaacatgttctccccgacgccagcggcgcagtattaaggaccacttcaatgtctataaagccacaagaccgtacctagctcactgtcccgactgtggagaagggcactcgtgccatagtcccgtagcgctagaacgcatcagaaacgaagcgacagacgggacgttgaaaatccaggtttccttgcaaatcggaataaagacggatgatagccatgattggaccaagctgcgttatatggacaatcacatgccagcagacgcagagcgggccgggctatttgtaagaacgtcagcaccgtgcacgattactggaacaatgggacacttcattctggcccgatgtccgaaaggagaaactctgacggtggggttcactgacggtaggaagatcagtcactcatgtacgcacccatttcaccatgaccctcctgtgataggccgggaaaaattccattcccgaccgcagcacggtagggaactaccttgcagcacgtacgcgcagagcaccgctgcaactgccgaggagatagaggtacacatgcccccagacaccccagatcgcacattaatgtcacaacagtccggcaatgtaaagatcacagtcaatagtcagacggtgcggtacaagtgcaattgtggtgactcaagtgaaggattaaccactacagataaagtgattaataactgcaaggtcgatcaatgccatgccgcggtcaccaatcacaaaaaatggcagtataattcccctctggtcccgcgtaatgctgaattcggggaccggaaaggaaaagttcacattccatttcctctggcaaatgtgacatgcagggtgcctaaagcaagaaaccccaccgtgacgtacggaaaaaaccaagtcatcatgttgctgtatcctgaccacccaacgctcctgtcctacaggaatatgggagaagaaccaaactatcaagaagagtgggtgacgcataagaaggagatcaggttaaccgtgccgactgaggggctcgaggtcacgtggggtaacaatgagccgtacaagtattggccgcagttatccacaaacggtacagcccacggccacccgcatgagataattctgtattattatgagctgtacccaactatgactgcggtagttttgtcagtggcctcgttcatactcctgtcgatggtgggtgtggcagtggggatgtgcatgtgtgcacgacgcagatgcattacaccgtacgaactgacaccaggagctaccgtccctttcctgcttagcctaatatgctgcattagaacagctaaagcggccacataccaggaggccgcggtatacctgtggaacgagcagcagcctttattttggatgcaagcccttattccgctggcagccctgattgtcctatgtaactgtctgagactcttaccatgctgttgtaaaatgttgacttttttagccgtactgagcgtcggtgcccacactgtgagcgcgtacgaacacgtaacagtgatcccgaacacggtgggagtaccgtataagactctagtcaacagaccgggctacagccccatggtattggagatggagcttctgtctgtcaccttggaaccaacgctatcgcttgattacatcacgtgcgagtataaaaccgttatcccgtctccgtacgtgaaatgctgcggtacagcagagtgtaaggacaagagcctacctgattacagctgtaaggtcttcaccggcgtctacccattcatgtggggcggcgcctactgcttctgcgacaccgaaaatacgcaattgagcgaagcacatgtggagaagtccgaatcatgcaaaacagaatttgcatcagcatacagggctcataccgcatccgcatcagctaagctccgcgtcctttaccaaggaaataatatcactgtggctgcttatgcaaacggcgaccatgccgtcacagttaaggacgctaaattcatagtggggccaatgtcttcagcctggacacctttcgacaataaaatcgtggtgtacaaaggcgacgtctacaacatggactacccgcccttcggcgcaggaagaccaggacaatttggcgacatccaaagtcgcacgcctgagagcgaagacgtctatgctaatacacaactggtactgcagagaccgtccgcgggtacggtgcacgtgccgtactctcaggcaccatctggcttcaagtattggctaaaagaacgaggggcgtcgctgcagcacacagcaccatttggctgtcaaatagcaacaaacccggtaagagcgatgaactgcgccgtagggaacatgcctatctccatcgacataccggacgcggcctttaccagggtcgtcgacgcgccatctttaacggacatgtcgtgtgaggtatcagcctgcacccattcctcagactttgggggcgtagccatcattaaatatgcagccagtaagaaaggcaagtgtgcagtgcactcgatgactaacgccgtcactattcgggaagctgaaatagaagtagaagggaactctcagttgcaaatctctttttcgacggccctagccagcgccgaatttcgcgtacaagtctgttctacacaagtacactgtgcagccgagtgccatccaccgaaagaccatatagtcaattacccggcgtcacacaccaccctcggggtccaagacatttccgctacggcgatgtcatgggtgcagaagatcacgggaggtgtgggactggttgtcgctgttgcagcactgatcctaatcgtggtgctatgcgtgtcgtttagcaggcactaacttgacaactaggtatgaaggcatacgcgtccctaaagagacacaccgcatatagctaggaatcaacagataagtatagatctaagggctgaacaacccctgaataacaaaatataaaaatcaacaaaaatcataaaatagaaaactagaaatagaagtaggtaagaaggtatatgtgtcccctaagagacacaccatatatagctaagaatcaatagataagcatagatcaaagggctgaacaacccctgaataataacaaaatataaaaaccaataaaaatcataaaatagaaaatcaacaaaaatcataaaatagaaaactagaaatagaagtaggtaagaaggtatatgtgtcccctaagagacacaccatatatagctaagaatcaatagataagcatagatcaaagggctgaacaacccctgaataataacaaaatataaaaaccaataaaaatcataaaatagaaaaccacaaatagaagtagttcaaagggctataaaacccctgaatagtaacaaaatataaaactaataaaaatcaaacgaataccataattggcaatcggaagagatgtaggtacttaagcttcttaaaagcagccgaactcgctttgagatgtaggcgtagcacaccgaactcttccataattctccgaacccacagggacgtaggagatgttcaaagtgactataaaaccctgaacagtaataaaatataaaattaataatgagtaccataattggcaaatggaagagacgtaggtactaagcttcttaaaagcagccgaactcactttgagatgtaggcatagcataccgaactcttccacaattctccgtacccatagggacgtaggagatgttattttgtttttaatatttcaaaaaaaaaaaaaaaaaaaaaaaaaaaaaaaaaaaaaaaaa

SEQ ID NO: 52 - DNA, 10258 bp, Artificial Sequence
  Synthetic sequence
atggctgcgtgagacacacgtagcctaccagtttcttactgctctactctgcaaagcaagagattaataacccatcatggattctgtgtacgtggatatagacgctgacagcgcctttttgaaggccctgcaacgtgcgtaccccatgtttgaggtggaacctaggcaggtcacatcaaatgaccatgctaatgctagagcgttctcgcatctagccataaaactaatagagcaggaaattgatcccgactcaaccatcctggatataggtagtgcgccagcaaggaggatgatgtcggacaggaagtaccactgcgtttgcccgatgcgcagcgcagaagatcccgagagactcgctaattatgcgagaaaatgagacagagaggtctagaaatatctgcacgtacggttgattcgctgctcttgaatggatgcaatagaccagtcgacgtgttgtacgtagacgaggcgtttgcgtgccactctggaacgttacttgccttgatcgccttggtgagaccaagactgaaagttgtactttgtggtgacccgaagcagtgcggcttcttcaatatgatgcagatgaaagtcaactacaatcataacatctgcactcaagtgtaccacaaaagtatttccaggcggtgtacactgcctgtgactgccattgtgtcgtcgttgcattacgaaggcaaaatgcgcactacgaatgagtacaacatgccgattgtagtggacactacgggctcaacaaaacctgaccctggagacctcgtgttaacgtgcttcagagggtgggttaaacaactgcaaattgactatcgtggacacgaggtcatgacagcagccgcatcccaagggttaaccagaaaaggagtttacgcagttaggcaaaaagttaacgaaaacccactctatgcatcaacatcagagcacgtcaacgtactcctaacgcgtacggaaggtaaactggtatggaagacactctctggtgacccgtggataaagacgctgcagaacccaccgaaaggaaacttcaaggcaactattaaggagtgggaggtggagcacgcatcgataatggcgggcatctgcagtcaccaagtgacctttgacacgttccaaaacaaagccaacgtttgctgggctaagagcttggtccctatcctcgaaacagcggggataaaactaaatgataggcagtggtcccagataattcaagctttcaaagaagacaaagcatactcacccgaagtagccctgaatgaaatatgcacgcgcatgtatggggtggatctagacagcgggctattctctaaaccgttggtatctgtgtattacgcggataaccactgggataataggccgggaggaaagatgttcggattcaaccctgaggcagcgtccattctagaaagaaagtacccgtttacaaaaggaaagtggaacatcaacaagcagatctgcgtgactaccaggaggatagaagacttcaaccctaccaccaacattataccggccaacaggagactaccacactcattagtggccgaacaccgcccagtaaaaggggaaagaatggaatggctggttaacaagataaacggacatcatgtgctcctggttagcggctataaccttgcactgcctactaagagagtcacctgggtagcgccactaggtgtccgcggagcggactatacatacaacctagagctgggtctaccggcaacacttggtaggtatgacctagtggtcataaacatccacacaccttttcgcatacaccattaccaacagtgcgtagatcacgcaatgaaactgcaaatgctaggaggtgactcactgagactgctcaaaccgggtggctctctattgatcagagcatacggttacgcagatagaaccagtgaacgagtaatctgcgtactgggacgtaagtttagatcgtccagagcattgaaaccaccatgtatcaccagtaatactgagatgttcttcctatttagcagttttgacaatggcagaaggaattttacaacgcatgttatgaacaatcaactgaacgcagcctttgtaggacaggccacccgagcaggatgtgcaccatcgtaccgggtaaagcgcatggacatcgcgaagaacgatgaagagtgcgtggtcaacgccgccaaccctcgcgggttaccgggtgacggtgtttgcaaggcagtatataaaaaatggccggagtcctttaaaaatagtgcaacaccagtaggaaccgcaaaaacagttatgtgcggtacatatccagtaatccatgccgtaggaccaaacttctcaaattacacggagtccgaaggggaccgggaattggcggctgcctatcgagaagtcgcaaaggaagtaactagactgggagtaaatagcgtagctatacctctcctctccacaggtgtatactcaggagggaaagacaggctaacccagtcactgaaccacctctttacagccatggactcgacggatgcagacgtggtcatctactgccgagacaaggaatgggagaagaaaatatctgaggccatacagatgcggacccaagtggagctgctggatgagcacatctccatagactgcgatgtcattcgcgtgcaccctgacagtagtttggcaggtagaaaaggatacagcaccacggaaggcgcactgtattcatatctagaagggacacgttttcaccagacggcagtggatgtggcagagatacatactatgtggccaaagcaaatagaggccaatgagcaagtctgcctatatgccctgggggaaagtattgagtcaatcaggcagaaatgcccggtggatgatgcagatgcatcatctcccccgaaaaccgtcccgtgcctttgccgttatgccatgactcctgaacgcgtcacccgacttcgcatgaaccatgtcacaaatataattgtgtgttcttcatttccccttccaaagtacaagatagaaggagtgcaaaaagtcaaatgctccaaggtaatgttatttgatcacaatgtgccatcgcgcgtaagtccaagggaatacagatcttcccaggagtctgtacgggaagtgagtatgacaacgtcattgacgcatagtcagtttgatctaagcgccgatggcgagacactgcccgtcccgtcagacctggatgctgacgccccagccctagaaccggccctagacgacggggcgatacatacgaccggaaaccttgcggccgtgtctgactgggtaatgagcaccgtacccgtcgcgccgcctagaagaaggagagggagaaacctgaccgtgatatgtgacgagagagaagggaatataacacccatggctagcgtccgattctttagagcagagcagtgtccgaccgtacaagaaacagcggagacgcgtgacacagctatttcctttcgggcaccgccaagtatcaccgtggaactgagccatccaccgatctccttcggagcaccaagcgagacgttccccatcacatttggggacttcaacgatggagaaatcgaaagcttgtcttctgagctactaactttcggagacttcctacccggtgaagtggatgatttgacagatagcgactggtccacgtgctcagacacggacgacgagttatgactagacagggcaggtgggtatatattctcgtcggacaccggtccaggccatttacaacagaagtcggtacgccagtcagtgctgccggtaaacaccctggaggaagttcacgaggagaagtgttacccacctaagctggatgaattaaaggagcaactactacttaagaaactccaggagagtgcgtccacggccaatagaagcaggtatcaatcacgcaaagtggaaaatatgaaagcaacaatcatccagagactaaagagaggctgtaaactgtatttaatggcagagaccccgaaagtcccgacttatcggaccgtatacccggcgcctgtgtactcgcctccgatcaacgtccgattgtccaatcccgagtccgcagtggcagcatgtaatgagttcttagctagaaactacccaactgtttcatcataccaaatcaccgatgagtatgatgcatatctagacatggtggacgggtcggagagttgcttggaccgagcgacattcaatccgtcaaaacttaggagctacccgaaacaacatgcttatcacgcgccctctatcagaagcgctgtaccttccccattccagaacacactacagaatgtactggcagcagccacgaaaaggaactgcaacgtcacacagatgagggaattacccactttggactcagcagtattcaacgtggagtgttttaaaaaattcgcatgcaaccgagaatactgggaagaatttgctgccagccctatcaggataacgactgagaatctaacaacctatgtcactaaattaaaggggccaaaagcagcagcgttgcttgcaagaacccataatctgctgccgctgcaggatgtaccaatggataggttcacagtagatatgaaaagggacgtgaaggtaactcctggcacaaagcatacagaggaaaggcctaaggtgcaggttatacaggcggctgaacccttggcaacagcgtacctatgtggaattcacagagaattggttaggagattgaacgccgtcctcctacccaacgtgcatacactatttgacatgtctgccgaggacttcgatgccattatagccgcacactttaagccaggagacgccgttttagaaacggacatagcctcctttgataagagccaggatgattcacttgcgcttaccgccttaatgctgttagaagatttgggagtggatcactccttgttggacctgatagaggctgcttttggagagatttccagctgtcacctgccgacaggtacgcgcttcaagttcggcgctatgatgaaatccggtatgttcctaactctgttcgtcaacacattgttaaatatcaccatcgctagccgggtgttggaagatcgtctgacaaaatctgcatgcgcggccttcatcggcgacgacaacataatacatggtgtcgtctccgatgaattgatggcagccagatgcgctacttggatgaacatggaagtgaagatcatagatgcagttgtatcccagaaagctccctacttttgtggagggtttatactgcatgatactgtgacaggaacagcttgcagggtggcggacccgctaaaaaggttatttaaactgggcaaaccgttagcggcaggtgacgaacaagacgaagacagaaggcgggcgctggctgatgaagtaatcagatggcaacgaacagggctaatagatgagctggagaaagcggtgtactctaggtacgaagtgcagggtatatcagttgctgtaatgtccatggccacctttgcaagctccagatccaacttcgagaagctcagaggacccgtcataaccttgtacggcggtcctaaataggtacgcactacagctacctattttgcaaaagccgacagcaggtacctaaataccaatcagccataatggagtttatcccaacccaaactttctacaataggaggtaccagcctcgaccttggactccgcgccctactatccaagtcatcagacccagaccgcgtccgcaaaggaaggccgggcaacttgcccagctgatctcagcagttaataaactgacaatgcgcgtggtacctcaacagaagccgcgcaagaatcggaagaataagaagcaaaagcaaaagcagcaggcgccacgaaacaatacgaatcaaaagaagcagccccccaaaaagaaaccggttcaaaagaaaaagaagccgggccgcagagagagaatgtgcatgaaaatcgaaaatgattgcatcttcgaagtcaagcatgaaggtaaggtaacaggttacgcgtgcttggtaggggacaaagtaatgaagccagcacacgtaaaggggaccatcgataacgcggacctggccaaattggccttcaagcggtcatctaagtacgaccttgaatgcgcgcagatacccgtgcacatgaagtccgacgcttcgaagttcacccatgagaaaccggaggggtactacaactggcaccacggagcagtacagtactcaggaggccgattcaccatccctacaggtgcgggcaaaccaggggatagtggtagaccgatcttcgacaacaaggggcgcgtggtggccatagttttaggaggagctaatgaaggagcccgtacagccctctcggtggtgacctggaacaaagacatcgtcacgaaaatcacccctgagggggccgaagagtggagtctggccattccagttatgtgcctgctggcaaataccacgttcccctgctcccggcccccttgcacaccctgctgctacgaaaaagagccggagaaaaccttgcgcatgcttgaagacaatgtcatgagccccgggtactatcagctgctacaagcatccttaacatgttctccccgacgccagcggcgcagtattaaggaccacttcaatgtctataaagccacaagaccgtacctagctcactgtcccgactgtggagaagggcactcgtgccatagtcccgtagcgctagaacgcatcagaaacgaagcgacagacgggacgttgaaaatccaggtttccttgcaaatcggaataaagacggatgatagccatgattggaccaagctgcgttatatggacaatcacatgccagcagacgcagagcgggccgggctatttgtaagaacgtcagcaccgtgcacgattactggaacaatgggacacttcattctggcccgatgtccgaaaggagaaactctgacggtggggttcactgacggtaggaagatcagtcactcatgtacgcacccatttcaccatgaccctcctgtgataggccgggaaaaattccattcccgaccgcagcacggtagggaactaccttgcagcacgtacgcgcagagcaccgctgcaactgccgaggagatagaggtacacatgcccccagacaccccagatcgcacattaatgtcacaacagtccggcaatgtaaagatcacagtcaatagtcagacggtgcggtacaagtgcaattgtggtgactcaagtgaaggattaaccactacagataaagtgattaataactgcaaggtcgatcaatgccatgccgcggtcaccaatcacaaaaaatggcagtataattcccctctggtcccgcgtaatgctgaattcggggaccggaaaggaaaagttcacattccatttcctctggcaaatgtgacatgcagggtgcctaaagcaagaaaccccaccgtgacgtacggaaaaaaccaagtcatcatgttgctgtatcctgaccacccaacgctcctgtcctacaggaatatgggagaagaaccaaactatcaagaagagtgggtgacgcataagaaggagatcaggttaaccgtgccgactgaggggctcgaggtcacgtggggtaacaatgagccgtacaagtattggccgcagttatccacaaacggtacagcccacggccacccgcatgagataattctgtattattatgagctgtacccaactatgactgcggtagttttgtcagtggcctcgttcatactcctgtcgatggtgggtgtggcagtggggatgtgcatgtgtgcacgacgcagatgcattacaccgtacgaactgacaccaggagctaccgtccctttcctgcttagcctaatatgctgcattagaacagctaaagcggccacataccaggaggccgcggtatacctgtggaacgagcagcagcctttattttggatgcaagcccttattccgctggcagccctgattgtcctatgtaactgtctgagactcttaccatgctgttgtaaaatgttgacttttttagccgtactgagcgtcggtgcccacactgtgagcgcgtacgaacacgtaacagtgatcccgaacacggtgggagtaccgtataagactctagtcaacagaccgggctacagccccatggtattggagatggagcttctgtctgtcaccttggaaccaacgctatcgcttgattacatcacgtgcgagtataaaaccgttatcccgtctccgtacgtgaaatgctgcggtacagcagagtgtaaggacaagagcctacctgattacagctgtaaggtcttcaccggcgtctacccattcatgtggggcggcgcctactgcttctgcgacaccgaaaatacgcaattgagcgaagcacatgtggagaagtccgaatcatgcaaaacagaatttgcatcagcatacagggctcataccgcatccgcatcagctaagctccgcgtcctttaccaaggaaataatatcactgtggctgcttatgcaaacggcgaccatgccgtcacagttaaggacgctaaattcatagtggggccaatgtcttcagcctggacacctttcgacaataaaatcgtggtgtacaaaggcgacgtctacaacatggactacccgcccttcggcgcaggaagaccaggacaatttggcgacatccaaagtcgcacgcctgagagcgaagacgtctatgctaatacacaactggtactgcagagaccgtccgcgggtacggtgcacgtgccgtactctcaggcaccatctggcttcaagtattggctaaaagaacgaggggcgtcgctgcagcacacagcaccatttggctgtcaaatagcaacaaacccggtaagagcgatgaactgcgccgtagggaacatgcctatctccatcgacataccggacgcggcctttaccagggtcgtcgacgcgccatctttaacggacatgtcgtgtgaggtatcagcctgcacccattcctcagactttgggggcgtagccatcattaaatatgcagccagtaagaaaggcaagtgtgcagtgcactcgatgactaacgccgtcactattcgggaagctgaaatagaagtagaagggaactctcagttgcaaatctctttttcgacggccctagccagcgccgaatttcgcgtacaagtctgttctacacaagtacactgtgcagccgagtgccatccaccgaaagaccatatagtcaattacccggcgtcacacaccaccctcggggtccaagacatttccgctacggcgatgtcatgggtgcagaagatcacgggaggtgtgggactggttgtcgctgttgcagcactgatcctaatcgtggtgctatgcgtgtcgtttagcaggcactaacttgacaactaggtatgaaggcatacgcgtccctaaagagacacaccgcatatagctaggaatcaacagataagtatagatctaagggctgaacaacccctgaataacaaaatataaaaatcaacaaaaatcataaaatagaaaactagaaatagaagtaggtaagaaggtatatgtgtcccctaagagacacaccatatatagctaagaatcaatagataagcatagatcaaagggctgaacaacccctgaataataacaaaatataaaaaccaataaaaatcataaaatagaaaatcaacaaaaatcataaaatagaaaactagaaatagaagtaggtaagaaggtatatgtgtcccctaagagacacaccatatatagctaagaatcaatagataagcatagatcaaagggctgaacaacccctgaataataacaaaatataaaaaccaataaaaatcataaaatagaaaaccacaaatagaagtagttcaaagggctataaaacccctgaatagtaacaaaatataaaactaataaaaatcaaacgaataccataattggcaatcggaagagatgtaggtacttaagcttcttaaaagcagccgaactcgctttgagatgtaggcgtagcacaccgaactcttccataattctccgaacccacagggacgtaggagatgttcaaagtgactataaaaccctgaacagtaataaaatataaaattaataatgagtaccataattggcaaatggaagagacgtaggtactaagcttcttaaaagcagccgaactcactttgagatgtaggcatagcataccgaactcttccacaattctccgtacccatagggacgtaggagatgttattttgtttttaatatttcaaaaaaaaaaaaaaaaaaaaaaaaaaaaaaaaaaaaaaaaa

SEQ ID NO: 53 - DNA, 3137 bp, Artificial Sequence
  Synthetic sequence
atggctgcgtgagacacacgtagcctaccagtttcttactgctctactctgcaaagcaagagattaataacccatcatggattctgtgtacgtggatatagacgctgacagcgcctttttgaaggccctgcaacgtgcgtaccccatgtttgaggtggaacctaggcaggtcacatcaaatgaccatgctaatgctagagcgttctcgcatctagccataaaactaatagagcaggaaattgatcccgactcaaccatcctggatataggtagtgcgccagcaaggaggatgatgtcggacaggaagtaccactgcgtttgcccgatgcgcagcgcagaagatcccgagagactcgctaattatgcgagaaagctcgcatctgccgcaggaaaagtcctggacagaaacatttctggaaagatcggggacttacaagaggtgatggccgtgccagacacggagacgccaacattttgcctacacacagatgtctcatgtagacagagagcagacgtcgcgatataccaagacgtctatgctgtacatgcacccacgtcgctatatcaccaggcgattaaaggagtccgagtggcgtactgggtagggttcgacacaaccccgttcatgtacaacgctatggcgggtgcctacccctcatactcgacaaattgggcggatgagcaggtactgaaggctaagaacataggattatgttcaacagacctgacagaaggtagacgaggcaaattgtctatcatgagagggaaaaagctaaaaccgtgcgaccgtgtgctgttctcagtagggtcaacgctttacccggaaagccgcatgctacttaagagctggcacctaccatcggtgttccatctaaagggcaagcttagcttcacatgccgctgtgacacagtggtttcgtgtgagggctacgtcgttaagagaataacgatgagcccaggcctttatggaaaaaccacggggtatgcggtaacccaccacgcagacggattcttgatgtgcaagactaccgacacggtagacggtgaaagagtgtcattctcggtgtgcacgtacgtgccggcgaccatttgtgatcaaatgaccggcatccttgctacagaagtcacgccggaggatgcacagaagctgttggtggggctgaaccagagaatagtggttaacggcagaacgcaacggaacacgaacaccatgaagaactacctgcttcccgtggtcgcccaggccttcagtaagtgggcgaaggagtgccggaaggacatggaagatgagaagcttttgggggtcagagaaagaacactgacctgctgctgtctgtgggcatttaagaagcagaaaacacacacggtctacaagaggcctgatacccagtcaatccagaaggttcaggccgaattcgacagctttgtagtaccaggcctgtggtcgtccgggttgtcaatcccgttgaggactagaatcaagtggctgttacgcaaggtgccgaaagcagacctgatcccatatagcggaaatgcccaagaagcccaggatgctgaaaaagaagcagaggaagaacgagaagcagaactgactcatgaggctctaccacccctacaggcagcacaggaagatgtccaggtcgaaatcgacgtggaacaacttgaggatagagctggtgctggaataatagagactccgagaggcgctattaaagttactgcccaactaacggaccacgtcgtgggggagtacctggtactttccccgcagaccgtattacgcagccagaagctcagcctgatccacgctttagcggagcaagtgaagacgtgtacgcatagcggacgagcagggaggtatgcggtcgaagcgtacgatggccgagtcctagtgccctcaggctatgcaatttcgcccgaagacttccagagtctaagcgaaagcgcaacgatggtgtacaacgaaagagagttcgtaaacagaaagttacaccacattgcgatgcacggaccagctctgaacactgacgaagagtcgtatgagcttgtgagggcagagaggacagaacacgagtacgtctacgacgtggaccagagaagatgctgcaagaaggaagaagctgcaggattggtactggtgggcgacttgactaatccgccctaccacgaattcgcatacgaagggctaaaaattcgccccgcttgtccatataaaattgcagtcataggagtcttcggggtaccaggatctggtaagtcagccattatcaagaacctagttaccaggcaagacctggtgactagcggaaagaaagaaaactgccaagaaatcagcaccgacgtgatgagacagagaggtctagaaatatctgcacgtacggttgattcgctgctcttgaatggatgcaatagaccagtcgacgtgttgtacgtagacgaggcgtttgcgtgccactctggaacgttacttgccttgatcgccttggtgagaccaagactgaaagttgtactttgtggtgacccgaagcagtgcggcttcttcaatatgatgcagatgaaagtcaactacaatcataacatctgcactcaagtgtaccacaaaagtatttccaggcggtgtacactgcctgtgactgccattgtgtcgtcgttgcattacgaaggcaaaatgcgcactacgaatgagtacaacatgccgttcaaagggctataaaacccctgaatagtaacaaaatataaaactaataaaaatcaaacgaataccataattggcaatcggaagagatgtaggtacttaagcttcttaaaagcagccgaactcgctttgagatgtaggcgtagcacaccgaactcttccataattctccgaacccacagggacgtaggagatgttcaaagtgactataaaaccctgaacagtaataaaatataaaattaataatgagtaccataattggcaaatggaagagacgtaggtactaagcttcttaaaagcagccgaactcactttgagatgtaggcatagcataccgaactcttccacaattctccgtacccatagggacgtaggagatgttattttgtttttaatatttcaaaaaaaaaaaaaaaaaaaaaaaaaaaaaaaaaaaaaaaaa

SEQ ID NO: 54 - DNA, 7168 bp, Artificial Sequence
  Synthetic sequence
ttaaaactgggtgtgggttgttcccacccacaccacccaatgggtgttgtactctgttattccggtaactttgtacgccagtttttccctcccctccccatccttttacgtaacttagaagttttaaatacaagaccaatagtaggcaactctccaggttgtctaaggtcaagcacttctgtttccccggttgatgttgatatgctccaacagggcaaaaacaacagataccgttatccgcaaagtgcctacacagagcttagtaggattctgaaagatctttggttggtcgttcagctgcatacccagcagtagaccttgcagatgaggctggacattccccactggtaacagtggtccagcctgcgtggctgcctgcgcacctctcatgaggtgtgaagccaaagatcggacagggtgtgaagagccgcgtgtgctcactttgagtcctccggcccctgaatgcggctaaccttaaacctgcagccatggctcataagccaatgagtttatggtcgtaatgagtaattgcgggatgggaccgactactttgggtgtccgtgtttcactttttcctttattaattgcttatggtgacaatatatatattgatatatattggcatcatgggcgcccaggtatctagacaaaatgttggtacacactcaacccaaaattcagtgtcaaatggatcaagtttaaattactttaatataaattacttcaaggatgctgcctcaagtggtgcatctagattagatttctctcaagatccaagcaaattcactgacccagttaaagatgtcttagaaaaggggatcccaacactacaatcaccatctgttgaggcttgtggctattcagacaggattatgcaaataaccagaggagattcaacaatcacatctcaagatgtagcaaatgctgtggttgggtatggggtctggccgcattacttaacaccacaagatgccactgctatagacaaaccaacacaacctgatacatcatcaaatagattttatacactagagagtaaacattggaatggtagttcaaaaggatggtggtggaaattaccagatgctcttaaagacatgggtatttttggagaaaatatgtattatcatttcctgggtagaagtggatatacagttcatgtgcagtgtaatgctagtaaattccatcagggtaccttgttagttgtaatgataccagaacaccagctagcaagtgcaaaacacggaagtgtgactgctggttacgaactcacacacccaggtgaggctggcagagatgtaagtcaagaacgtgatgcaagtttaagacaacctagtgatgatagttggcttaattttgatggcacccttcttggaaatttattaattttcccacatcaatttataaaccttaggagtaataattctgcaactctaatagtaccatatgtaaatgctgtgccaatggattcaatgcttcgacataataactggagcctggtcatcataccaattagtccattacgtagtgaaactacatcttctaatatagtgccaatcactgtatcaataagtcccatgtgtgctgaattttctggtgcaagagcaaaaaacattaaacaaggattacctgtatatataactccaggatctgggcaattcatgactactgatgatatgcaatcaccttgtgcactaccctggtaccatcctactaaagaaatatctattccgggtgaagttaaaaaccttatagaaatgtgtcaagttgataccttgattccagtcaataatgtgggtaacaatgttggaaatgtcagtatgtacactgtacaactagggaaccaaacaggcatggcacaaaaagtcttttcaataaaagtagacattacatcacagcctttggctacaactttaattggggagattgcaagctattacacccattggactggcagtctgcgatttagttttatgttttgtgggactgcaaacacaacacttaaattattacttgcatacacaccacctggtattgatgaaccaacaactagaaaggatgcaatgctagggacacatgttgtgtgggatgttggattgcagtctactatatctcttgttgtaccatgggtgagtgccagccacttcaggttaactgcagataataaatactccatggctggttatatcacatgttggtaccaaactaatttagtagtgcccccaagtacgccacagactgctgatatgctgtgttttgtttctgcatgtaaagatttttgtctacgaatggcaagggatacagatttacacatacaaagtggtccaatagagcaaaatccagtagaaaactacattgatgaagttttaaatgaagttttagtagtgccgaatataaaagaaagtcatcacactacatcaaactctgccccacttttagatgctgcagagacgggacacaccagtaatgttcaaccagaagatgctatagagacaaggtatgttataacatcacaaacaagagatgagatgagtatagaaagtttccttggtagatctggttgtgtccacatctcaagaataaaggttgattacactgactataatggacaggacataaatttcacaaaatggaaaatcacactacaggaaatggcacagattaggagaaaatttgaattgtttacatatgtcaggtttgactcagaaataaccttggtgccttgtattgctggtagaggagacgacattggacatattgtaatgcaatatatgtatgttcctccaggagctccaattccttcaaaaagaaacgatttctcatggcaatcaggcaccaatatgtcaatattctggcaacatggacagccatttcctagattttctttaccatttcttagcattgcatcagcttattatatgttttatgatggatatgatggagacaacacttcttccaagtatggtagcgtagttactaatgatatgggtactatatgctcaagaatagttacagaaaaacagaaacattctgttgtcatcacaacacacatatatcataaagctaaacacacaaaagcttggtgtcctaggccccctagagctgtcccttacacacatagtcatgtgactaattatatgccagaaacaggtgacgtgacaacagccatagtccgcagaaacactataacaactgctgggcccagtgatctatatgtgcatgtaggtaacttaatatatagaaacttacatctgttcaattctgaaatgcatgattcaattttgatttcatactcttctgatttaatcatataccgcacaaacactataggtgatgattatattcccaattgtaactgcactgaggctacttattattgtagacacaaaaataggtattacccaataaaagttactccacatgattggtatgaaatacaagagagtgaatattaccccaaacacatccaatacaacctattaattggtgaaggaccatgtgaacctggtgattgtggtggaaaacttctttgtagacatggtgtcattggcataatcacagcaggtggtgaaggtcatgtagcatttatagatcttagacaatttcactgtgctgaggaacaaggcataactgattacatacacatgttgggagaggcttttggcaatggttttgtagatagtgttaaagaacaaataaatgcaataaatccaatcaataacattagtaagaaggttattaagtggctacttagaataatctcggctatggttattataatcagaaactcctctgaccctcaaacgatcatagcaaccttgacactaattggttgcaatggttcaccatggagatttctcaaagaaaagttttgcaaatggacccaattaacttatatccacaaagagtctgattcatggcttaagaaattcactgaaatgtgtaatgctgcacgtggtcttgaatggattggtaataaaatttcaaaatttatagattggatgaaatctatgctaccccaggcccaattgaaagttaaatacttgaatgaaataaagaaactcagtttgcttgaaaaacagattgaaaatctacgtgcggcagatagtgcaacacaagagaaaatcaaatgtgaaattgacaccctacatgatctatcgtgcaaatttcttcctttgtatgcacatgaggcaaaaagaatcaaagtgctttataataaatgttccaatataattaaacaaagaaagagaagtgaaccggtggcggtgatgatacatggaccacccggtactggtaaatctataacaactaacttcttggctagaatgataacaaatgaaagtgatgtgtactcattacctccagatcccaaatattttgatggttatgacaatcagagtgttgtaatcatggatgatattatgcaaaatccagatggagaagacatgacactattttgccaaatggtttcaagtgttacatttataccacccatggctgatttgcctgacaagggtaaaccatttgattcaagatttatcttatgtagtactaaccactcgcttttagccccacctactatatcttcattacccgcaatgaatagaagatttttctttgacttagatattgtagttcatgacaattataaagatacacaagggaaattagatgtatccaaagcttttcgaccttgtaatgttaacaccaaaattggcaatgcaagatgttgtccatttgtatgtggtaaggcagtgacattcaaagatcgcagcacttgctcaacatacaccttagctcaagtttacaatcacattttggaagaagacaaaagaaggagacaggtggtggatgtcatgtctgcaattttccaaggaccaatttctttagacgctccaccaccaccagctatagcagatctgttacaatcagttagaacacctgaggtaatcaagtactgtcaagataataaatggatcattccagcagagtgccaagtggaaagagacttaaatatagccagtagcataatagctattatagcaaatataataagtatagctggcattatacttgtaatttataaattgttttgttcattacaaggaccatactcaggtgaacctaaacctaaaaccaaagtacctgaaagaagagtagttgctcaaggtccagaagaagaatttggaaggtcaattctcaaaaacaatacttgtgtgattactacaggtaatggaaaatttacaggtcttggtatacatgacagaattctaatcatcccaacacatgctgatccaggtagagaggtccaagttaatggtgtccacactaaggttctagactcatatgatctttataatagagatggagttaaacttgaaataacggtcatacaattagatagaaatgaaaaatttagggacattagaaagtatatacctgaaacagaagacgattatccagaatgcaatttggcactttcagctaatcaagatgaaccaactataattaaagtaggagatgtagtgtcctatggcaatattttgcttagtggaaatcaaacagccagaatgcttaaatataattaccccacaaaatctgggtattgtggaggggtactatataaaattggtcaaattctaggtattcatgtgggtggaaatggaagggatggtttttcagccatgttacttagatcatactttacagatactcagggccaaattaaagtcaataagcatgctactgaatgtggtcttccaactatacacactcctagcaaaaccaaacttcagcctagtgtattttatgatgtcttcccaggttctaaggaaccagctgtgctcacagataatgaccctagattggaagttaattttaaagaagctttattttctaaatataaaggtaatgtggaatgtaatttgaatgaacatatggaaattgctattgcccattactcagcacaattaatgacactagatattgattccaggccaatagcattggaagatagcgtgtttggaatagaaggacttgaggctttagatctaaacaccagtgcagggtttccttatgtcacaatgggtattaaaaagagagatttaataaataacaaaacaaaagatatatccaggcttaaagaggctctagataaatatggagttgacttacccatgatcactttcttaaaagacgagcttaggaaaaaggagaaaatttcaacaggtaaaactagagttatagaagcaagtagtataaatgacacaatattatttagaactacttttggcaatttgttctctaagtttcatttaaacccaggcgttgttactggctctgcagtagggtgtgaccctgagactttctggtctaaaatcccagttatgcttgatggagattgtataatggcttttgactatacaaattatgatggtagtatacaccctgtctggtttcaagctctgaaaaaagttcttgaaaatttatctttccaatctaatttaattgatagattgtgttattccaagcacttgtttaaatcaacatattatgaagtggcaggtggagttccttctgggtgttctggaaccagtatattcaatactatgattaataacattataataagaacactagttctagatgcatacaaaaatattgatctggacaagcttaaaataattgcatatggtgatgatgtgattttctcttataaatatactctagatatggaagctattgctaatgaaggaaagaaatatggacttacaataacaccagcagataagtccaatgaattcaagaaacttgattatagtaatgtgacttttcttaaacgtggttttaagcaagatgaaagacatacattccttattcatcctacattcccagtggaagagatacatgaatcaattagatggaccaagaaaccttcacagatgcaagaacatgtgctatcattatgtcacctgatgtggcacaatggacgtaaggtgtatgaagatttctctagtaagatacgcagtgtcagcgctggacgtgcactgtatatcccaccttatgatctgttgaaacatgaatggtatgaaaaattttagatatagaaataatgaatgaatgattctttaattctataaaaaaaaaaaaaaaaaaaaaaaaaaaaaaa

SEQ ID NO: 55 - DNA, 6973 bp, Artificial Sequence
  Synthetic sequence
ttaaaactgggtgtgggttgttcccacccacaccacccaatgggtgttgtactctgttattccggtaactttgtacgccagtttttccctcccctccccatccttttacgtaacttagaagttttaaatacaagaccaatagtaggcaactctccaggttgtctaaggtcaagcacttctgtttccccggttgatgttgatatgctccaacagggcaaaaacaacagataccgttatccgcaaagtgcctacacagagcttagtaggattctgaaagatctttggttggtcgttcagctgcatacccagcagtagaccttgcagatgaggctggacattccccactggtaacagtggtccagcctgcgtggctgcctgcgcacctctcatgaggtgtgaagccaaagatcggacagggtgtgaagagccgcgtgtgctcactttgagtcctccggcccctgaatgcggctaaccttaaacctgcagccatggctcataagccaatgagtttatggtcgtaatgagtaattgcgggatgggaccgactactttgggtgtccgtgtttcactttttcctttattaattgcttatggtgacaatatatatattgatatatattggcatcatgggcgcccaggtatctagacaaaatgttggtacacactcaacccaaaattcagtgtcaaatggatcaagtttaaattactttaatataaattacttcaaggatgctgcctcaagtggtgcatctagattagatttctctcaagatccaagcaaattcactgacccagttaaagatgtcttagaaaaggggatcccaacactacaatcaccatctgttgaggcttgtggctattcagacaggattatgcaaataaccagaggagattcaacaatcacatctcaagatgtagcaaatgctgtggttgggtatggggtctggccgcattacttaacaccacaagatgccactgctatagacaaaccaacacaacctgatacatcatcaaatagattttatacactagagagtaaacattggaatggtagttcaaaaggatggtggtggaaattaccagatgctcttaaagacatgggtatttttggagaaaatatgtattatcatttcctgggtagaagtggatatacagttcatgtgcagtgtaatgctagtaaattccatcagggtaccttgttagttgtaatgataccagaacaccagctagcaagtgcaaaacacggaagtgtgactgctggttacgaactcacacacccaggtgaggctggcagagatgtaagtcaagaacgtgatgcaagtttaagacaacctagtgatgatagttggcttaattttgatggcacccttcttggaaatttattaattttcccacatcaatttataaaccttaggagtaataattctgcaactctaatagtaccatatgtaaatgctgtgccaatggattcaatgcttcgacataataactggagcctggtcatcataccaattagtccattacgtagtgaaactacatcttctaatatagtgccaatcactgtatcaataagtcccatgtgtgctgaattttctggtgcaagagcaaaaaacattaaacaaggattacctgtatatataactccaggatctgggcaattcatgactactgatgatatgcaatcaccttgtgcactaccctggtaccatcctactaaagaaatatctattccgggtgaagttaaaaaccttatagaaatgtgtcaagttgataccttgattccagtcaataatgtgggtaacaatgttggaaatgtcagtatgtacactgtacaactagggaaccaaacaggcatggcacaaaaagtcttttcaataaaagtagacattacatcacagcctttggctacaactttatctcttgttgtaccatgggtgagtgccagccacttcaggttaactgcagataataaatactccatggctggttatatcacatgttggtaccaaactaatttagtagtgcccccaagtacgccacagactgctgatatgctgtgttttgtttctgcatgtaaagatttttgtctacgaatggcaagggatacagatttacacatacaaagtggtccaatagagcaaaatccagtagaaaactacattgatgaagttttaaatgaagttttagtagtgccgaatataaaagaaagtcatcacactacatcaaactctgccccacttttagatgctgcagagacgggacacaccagtaatgttcaaccagaagatgctatagagacaaggtatgttataacatcacaaacaagagatgagatgagtatagaaagtttccttggtagatctggttgtgtccacatctcaagaataaaggttgattacactgactataatggacaggacataaatttcacaaaatggaaaatcacactacaggaaatggcacagattaggagaaaatttgaattgtttacatatgtcaggtttgactcagaaataaccttggtgccttgtattgctggtagaggagacgacattggacatattgtaatgcaatatatgtatgttcctccaggagctccaattccttcaaaaagaaacgatttctcatggcaatcaggcaccaatatgtcaatattctggcaacatggacagccatttcctagattttctttaccatttcttagcattgcatcagcttattatatgttttatgatggatatgatggagacaacacttcttccaagtatggtagcgtagttactaatgatatgggtactatatgctcaagaatagttacagaaaaacagaaacattctgttgtcatcacaacacacatatatcataaagctaaacacacaaaagcttggtgtcctaggccccctagagctgtcccttacacacatagtcatgtgactaattatatgccagaaacaggtgacgtgacaacagccatagtccgcagaaacactataacaactgctgggcccagtgatctatatgtgcatgtaggtaacttaatatatagaaacttacatctgttcaattctgaaatgcatgattcaattttgatttcatactcttctgatttaatcatataccgcacaaacactataggtgatgattatattcccaattgtaactgcactgaggctacttattattgtagacacaaaaataggtattacccaataaaagttactccacatgattggtatgaaatacaagagagtgaatattaccccaaacacatccaatacaacctattaattggtgaaggaccatgtgaacctggtgattgtggtggaaaacttctttgtagacatggtgtcattggcataatcacagcaggtggtgaaggtcatgtagcatttatagatcttagacaatttcactgtgctgaggaacaaggcataactgattacatacacatgttgggagaggcttttggcaatggttttgtagatagtgttaaagaacaaataaatgcaataaatccaatcaataacattagtaagaaggttattaagtggctacttagaataatctcggctatggttattataatcagaaactcctctgaccctcaaacgatcatagcaaccttgacactaattggttgcaatggttcaccatggagatttctcaaagaaaagttttgcaaatggacccaattaacttatatccacaaagagtctgattcatggcttaagaaattcactgaaatgtgtaatgctgcacgtggtcttgaatggattggtaataaaatttcaaaatttatagattggatgaaatctatgctaccccaggcccaattgaaagttaaatacttgaatgaaataaagaaactcagtttgcttgaaaaacagattgaaaatctacgtgcggcagatagtgcaacacaagagaaaatcaaatgtgaaattgacaccctacatgatctatcgtgcaaatttcttcctttgtatgcacatgaggcaaaaagaatcaaagtgctttataataaatgttccaatataattaaacaaagaaagagaagtgaaccggtggcggtgatgatacatggaccacccggtactggtaaatctataacaactaacttcttggctagaatgataacaaatgaaagtgatgtgtactcattacctccagatcccaaatattttgatggttatgacaatcagagtgttgtaatcatggatgatattatgcaaaatccagatggagaagacatgacactattttgccaaatggtttcaagtgttacatttataccacccatggctgatttgcctgacaagggtaaaccatttgattcaagatttatcttatgtagtactaaccactcgcttttagccccacctactatatcttcattacccgcaatgaatagaagatttttctttgacttagatattgtagttcatgacaattataaagatacacaagggaaattagatgtatccaaagcttttcgaccttgtaatgttaacaccaaaattggcaatgcaagatgttgtccatttgtatgtggtaaggcagtgacattcaaagatcgcagcacttgctcaacatacaccttagctcaagtttacaatcacattttggaagaagacaaaagaaggagacaggtggtggatgtcatgtctgcaattttccaaggaccaatttctttagacgctccaccaccaccagctatagcagatctgttacaatcagttagaacacctgaggtaatcaagtactgtcaagataataaatggatcattccagcagagtgccaagtggaaagagacttaaatatagccagtagcataatagctattatagcaaatataataagtatagctggcattatacttgtaatttataaattgttttgttcattacaaggaccatactcaggtgaacctaaacctaaaaccaaagtacctgaaagaagagtagttgctcaaggtccagaagaagaatttggaaggtcaattctcaaaaacaatacttgtgtgattactacaggtaatggaaaatttacaggtcttggtatacatgacagaattctaatcatcccaacacatgctgatccaggtagagaggtccaagttaatggtgtccacactaaggttctagactcatatgatctttataatagagatggagttaaacttgaaataacggtcatacaattagatagaaatgaaaaatttagggacattagaaagtatatacctgaaacagaagacgattatccagaatgcaatttggcactttcagctaatcaagatgaaccaactataattaaagtaggagatgtagtgtcctatggcaatattttgcttagtggaaatcaaacagccagaatgcttaaatataattaccccacaaaatctgggtattgtggaggggtactatataaaattggtcaaattctaggtattcatgtgggtggaaatggaagggatggtttttcagccatgttacttagatcatactttacagatactcagggccaaattaaagtcaataagcatgctactgaatgtggtcttccaactatacacactcctagcaaaaccaaacttcagcctagtgtattttatgatgtcttcccaggttctaaggaaccagctgtgctcacagataatgaccctagattggaagttaattttaaagaagctttattttctaaatataaaggtaatgtggaatgtaatttgaatgaacatatggaaattgctattgcccattactcagcacaattaatgacactagatattgattccaggccaatagcattggaagatagcgtgtttggaatagaaggacttgaggctttagatctaaacaccagtgcagggtttccttatgtcacaatgggtattaaaaagagagatttaataaataacaaaacaaaagatatatccaggcttaaagaggctctagataaatatggagttgacttacccatgatcactttcttaaaagacgagcttaggaaaaaggagaaaatttcaacaggtaaaactagagttatagaagcaagtagtataaatgacacaatattatttagaactacttttggcaatttgttctctaagtttcatttaaacccaggcgttgttactggctctgcagtagggtgtgaccctgagactttctggtctaaaatcccagttatgcttgatggagattgtataatggcttttgactatacaaattatgatggtagtatacaccctgtctggtttcaagctctgaaaaaagttcttgaaaatttatctttccaatctaatttaattgatagattgtgttattccaagcacttgtttaaatcaacatattatgaagtggcaggtggagttccttctgggtgttctggaaccagtatattcaatactatgattaataacattataataagaacactagttctagatgcatacaaaaatattgatctggacaagcttaaaataattgcatatggtgatgatgtgattttctcttataaatatactctagatatggaagctattgctaatgaaggaaagaaatatggacttacaataacaccagcagataagtccaatgaattcaagaaacttgattatagtaatgtgacttttcttaaacgtggttttaagcaagatgaaagacatacattccttattcatcctacattcccagtggaagagatacatgaatcaattagatggaccaagaaaccttcacagatgcaagaacatgtgctatcattatgtcacctgatgtggcacaatggacgtaaggtgtatgaagatttctctagtaagatacgcagtgtcagcgctggacgtgcactgtatatcccaccttatgatctgttgaaacatgaatggtatgaaaaattttagatatagaaataatgaatgaatgattctttaattctataaaaaaaaaaaaaaaaaaaaaaaaaaaaaaa

SEQ ID NO: 56 - DNA, 6972 bp, Artificial Sequence
  Synthetic sequence
ttaaaactgggtgtgggttgttcccacccacaccacccaatgggtgttgtactctgttattccggtaactttgtacgccagtttttccctcccctccccatccttttacgtaacttagaagttttaaatacaagaccaatagtaggcaactctccaggttgtctaaggtcaagcacttctgtttccccggttgatgttgatatgctccaacagggcaaaaacaacagataccgttatccgcaaagtgcctacacagagcttagtaggattctgaaagatctttggttggtcgttcagctgcatacccagcagtagaccttgcagatgaggctggacattccccactggtaacagtggtccagcctgcgtggctgcctgcgcacctctcatgaggtgtgaagccaaagatcggacagggtgtgaagagccgcgtgtgctcactttgagtcctccggcccctgaatgcggctaaccttaaacctgcagccatggctcataagccaatgagtttatggtcgtaatgagtaattgcgggatgggaccgactactttgggtgtccgtgtttcactttttcctttattaattgcttatggtgacaatatatatattgatatatattggcatcatgggcgcccaggtatctagacaaaatgttggtacacactcaacccaaaattcagtgtcaaatggatcaagtttaaattactttaatataaattacttcaaggatgctgcctcaagtggtgcatctagattagatttctctcaagatccaagcaaattcactgacccagttaaagatgtcttagaaaaggggatcccaacactacaatcaccatctgttgaggcttgtggctattcagacaggattatgcaaataaccagaggagattcaacaatcacatctcaagatgtagcaaatgctgtggttgggtatggggtctggccgcattacttaacaccacaagatgccactgctatagacaaaccaacacaacctgatacatcatcaaatagattttatacactagagagtaaacattggaatggtagttcaaaaggatggtggtggaaattaccagatgctcttaaagacatgggtatttttggagaaaatatgtattatcatttcctgggtagaagtggatatacagttcatgtgcagtgtaatgctagtaaattccatcagggtaccttgttagttgtaatgataccagaacaccagctagcaagtgcaaaacacggaagtgtgactgctggttacgaactcacacacccaggtgaggctggcagagatgtaagtcaagaacgtgatgcaagtttaagacaacctagtgatgatagttggcttaattttgatggcacccttcttggaaatttattaattttcccacatcaatttataaaccttaggagtaataattctgcaactctaatagtaccatatgtaaatgctgtgccaatggattcaatgcttcgacataataactggagcctggtcatcataccaattagtccattacgtagtgaaactacatcttctaatatagtgccaatcactgtatcaataagtcccatgtgtgctgaattttctggtgcaagagcaaaaaacattaaacaaggattacctgtatatataactccaggatctgggcaattcatgactactgatgatatgcaatcaccttgtgcactaccctggtaccatcctactaaagaaatatctattccgggtgaagttaaaaaccttatagaaatgtgtcaagttgataccttgattccagtcaataatgtgggtaacaatgttggaaatgtcagtatgtacactgtacaactagggaaccaaacaggcatggcacaaaaagtcttttcaataaaagtagacattacatcacagcctttggctacaacttatctcttgttgtaccatgggtgagtgccagccacttcaggttaactgcagataataaatactccatggctggttatatcacatgttggtaccaaactaatttagtagtgcccccaagtacgccacagactgctgatatgctgtgttttgtttctgcatgtaaagatttttgtctacgaatggcaagggatacagatttacacatacaaagtggtccaatagagcaaaatccagtagaaaactacattgatgaagttttaaatgaagttttagtagtgccgaatataaaagaaagtcatcacactacatcaaactctgccccacttttagatgctgcagagacgggacacaccagtaatgttcaaccagaagatgctatagagacaaggtatgttataacatcacaaacaagagatgagatgagtatagaaagtttccttggtagatctggttgtgtccacatctcaagaataaaggttgattacactgactataatggacaggacataaatttcacaaaatggaaaatcacactacaggaaatggcacagattaggagaaaatttgaattgtttacatatgtcaggtttgactcagaaataaccttggtgccttgtattgctggtagaggagacgacattggacatattgtaatgcaatatatgtatgttcctccaggagctccaattccttcaaaaagaaacgatttctcatggcaatcaggcaccaatatgtcaatattctggcaacatggacagccatttcctagattttctttaccatttcttagcattgcatcagcttattatatgttttatgatggatatgatggagacaacacttcttccaagtatggtagcgtagttactaatgatatgggtactatatgctcaagaatagttacagaaaaacagaaacattctgttgtcatcacaacacacatatatcataaagctaaacacacaaaagcttggtgtcctaggccccctagagctgtcccttacacacatagtcatgtgactaattatatgccagaaacaggtgacgtgacaacagccatagtccgcagaaacactataacaactgctgggcccagtgatctatatgtgcatgtaggtaacttaatatatagaaacttacatctgttcaattctgaaatgcatgattcaattttgatttcatactcttctgatttaatcatataccgcacaaacactataggtgatgattatattcccaattgtaactgcactgaggctacttattattgtagacacaaaaataggtattacccaataaaagttactccacatgattggtatgaaatacaagagagtgaatattaccccaaacacatccaatacaacctattaattggtgaaggaccatgtgaacctggtgattgtggtggaaaacttctttgtagacatggtgtcattggcataatcacagcaggtggtgaaggtcatgtagcatttatagatcttagacaatttcactgtgctgaggaacaaggcataactgattacatacacatgttgggagaggcttttggcaatggttttgtagatagtgttaaagaacaaataaatgcaataaatccaatcaataacattagtaagaaggttattaagtggctacttagaataatctcggctatggttattataatcagaaactcctctgaccctcaaacgatcatagcaaccttgacactaattggttgcaatggttcaccatggagatttctcaaagaaaagttttgcaaatggacccaattaacttatatccacaaagagtctgattcatggcttaagaaattcactgaaatgtgtaatgctgcacgtggtcttgaatggattggtaataaaatttcaaaatttatagattggatgaaatctatgctaccccaggcccaattgaaagttaaatacttgaatgaaataaagaaactcagtttgcttgaaaaacagattgaaaatctacgtgcggcagatagtgcaacacaagagaaaatcaaatgtgaaattgacaccctacatgatctatcgtgcaaatttcttcctttgtatgcacatgaggcaaaaagaatcaaagtgctttataataaatgttccaatataattaaacaaagaaagagaagtgaaccggtggcggtgatgatacatggaccacccggtactggtaaatctataacaactaacttcttggctagaatgataacaaatgaaagtgatgtgtactcattacctccagatcccaaatattttgatggttatgacaatcagagtgttgtaatcatggatgatattatgcaaaatccagatggagaagacatgacactattttgccaaatggtttcaagtgttacatttataccacccatggctgatttgcctgacaagggtaaaccatttgattcaagatttatcttatgtagtactaaccactcgcttttagccccacctactatatcttcattacccgcaatgaatagaagatttttctttgacttagatattgtagttcatgacaattataaagatacacaagggaaattagatgtatccaaagcttttcgaccttgtaatgttaacaccaaaattggcaatgcaagatgttgtccatttgtatgtggtaaggcagtgacattcaaagatcgcagcacttgctcaacatacaccttagctcaagtttacaatcacattttggaagaagacaaaagaaggagacaggtggtggatgtcatgtctgcaattttccaaggaccaatttctttagacgctccaccaccaccagctatagcagatctgttacaatcagttagaacacctgaggtaatcaagtactgtcaagataataaatggatcattccagcagagtgccaagtggaaagagacttaaatatagccagtagcataatagctattatagcaaatataataagtatagctggcattatacttgtaatttataaattgttttgttcattacaaggaccatactcaggtgaacctaaacctaaaaccaaagtacctgaaagaagagtagttgctcaaggtccagaagaagaatttggaaggtcaattctcaaaaacaatacttgtgtgattactacaggtaatggaaaatttacaggtcttggtatacatgacagaattctaatcatcccaacacatgctgatccaggtagagaggtccaagttaatggtgtccacactaaggttctagactcatatgatctttataatagagatggagttaaacttgaaataacggtcatacaattagatagaaatgaaaaatttagggacattagaaagtatatacctgaaacagaagacgattatccagaatgcaatttggcactttcagctaatcaagatgaaccaactataattaaagtaggagatgtagtgtcctatggcaatattttgcttagtggaaatcaaacagccagaatgcttaaatataattaccccacaaaatctgggtattgtggaggggtactatataaaattggtcaaattctaggtattcatgtgggtggaaatggaagggatggtttttcagccatgttacttagatcatactttacagatactcagggccaaattaaagtcaataagcatgctactgaatgtggtcttccaactatacacactcctagcaaaaccaaacttcagcctagtgtattttatgatgtcttcccaggttctaaggaaccagctgtgctcacagataatgaccctagattggaagttaattttaaagaagctttattttctaaatataaaggtaatgtggaatgtaatttgaatgaacatatggaaattgctattgcccattactcagcacaattaatgacactagatattgattccaggccaatagcattggaagatagcgtgtttggaatagaaggacttgaggctttagatctaaacaccagtgcagggtttccttatgtcacaatgggtattaaaaagagagatttaataaataacaaaacaaaagatatatccaggcttaaagaggctctagataaatatggagttgacttacccatgatcactttcttaaaagacgagcttaggaaaaaggagaaaatttcaacaggtaaaactagagttatagaagcaagtagtataaatgacacaatattatttagaactacttttggcaatttgttctctaagtttcatttaaacccaggcgttgttactggctctgcagtagggtgtgaccctgagactttctggtctaaaatcccagttatgcttgatggagattgtataatggcttttgactatacaaattatgatggtagtatacaccctgtctggtttcaagctctgaaaaaagttcttgaaaatttatctttccaatctaatttaattgatagattgtgttattccaagcacttgtttaaatcaacatattatgaagtggcaggtggagttccttctgggtgttctggaaccagtatattcaatactatgattaataacattataataagaacactagttctagatgcatacaaaaatattgatctggacaagcttaaaataattgcatatggtgatgatgtgattttctcttataaatatactctagatatggaagctattgctaatgaaggaaagaaatatggacttacaataacaccagcagataagtccaatgaattcaagaaacttgattatagtaatgtgacttttcttaaacgtggttttaagcaagatgaaagacatacattccttattcatcctacattcccagtggaagagatacatgaatcaattagatggaccaagaaaccttcacagatgcaagaacatgtgctatcattatgtcacctgatgtggcacaatggacgtaaggtgtatgaagatttctctagtaagatacgcagtgtcagcgctggacgtgcactgtatatcccaccttatgatctgttgaaacatgaatggtatgaaaaattttagatatagaaataatgaatgaatgattctttaattctataaaaaaaaaaaaaaaaaaaaaaaaaaaaaaa

SEQ ID NO: 57 - DNA, 6931 bp, Artificial Sequence
  Synthetic sequence
ttaaaactgggtgtgggttgttcccacccacaccacccaatgggtgttgtactctgttattccggtaactttgtacgccagtttttccctcccctccccatccttttacgtaacttagaagttttaaatacaagaccaatagtaggcaactctccaggttgtctaaggtcaagcacttctgtttccccggttgatgttgatatgctccaacagggcaaaaacaacagataccgttatccgcaaagtgcctacacagagcttagtaggattctgaaagatctttggttggtcgttcagctgcatacccagcagtagaccttgcagatgaggctggacattccccactggtaacagtggtccagcctgcgtggctgcctgcgcacctctcatgaggtgtgaagccaaagatcggacagggtgtgaagagccgcgtgtgctcactttgagtcctccggcccctgaatgcggctaaccttaaacctgcagccatggctcataagccaatgagtttatggtcgtaatgagtaattgcgggatgggaccgactactttgggtgtccgtgtttcactttttcctttattaattgcttatggtgacaatatatatattgatatatattggcatcatgggcgcccaggtatctagacaaaatgttggtacacactcaacccaaaattcagtgtcaaatggatcaagtttaaattactttaatataaattacttcaaggatgctgcctcaagtggtgcatctagattagatttctctcaagatccaagcaaattcactgacccagttaaagatgtcttagaaaaggggatcccaacactacaatcaccatctgttgaggcttgtggctattcagacaggattatgcaaataaccagaggagattcaacaatcacatctcaagatgtagcaaatgctgtggttgggtatggggtctggccgcattacttaacaccacaagatgccactgctatagacaaaccaacacaacctgatacatcatcaaatagattttatacactagagagtaaacattggaatggtagttcaaaaggatggtggtggaaattaccagatgctcttaaagacatgggtatttttggagaaaatatgtattatcatttcctgggtagaagtggatatacagttcatgtgcagtgtaatgctagtaaattccatcagggtaccttgttagttgtaatgataccagaacaccagctagcaagtgcaaaacacggaagtgtgactgctggttacgaactcacacacccaggtgaggctggcagagatgtaagtcaagaacgtgatgcaagtttaagacaacctagtgatgatagttggcttaattttgatggcacccttcttggaaatttattaattttcccacatcaatttataaaccttaggagtaataattctgcaactctaatagtaccatatgtaaatgctgtgccaatggattcaatgcttcgacataataactggagcctggtcatcataccaattagtccattacgtagtgaaactacatcttctaatatagtgccaatcactgtatcaataagtcccatgtgtgctgaattttctggtgcaagagcaaaaaacattaaacaaggattacctgtatatataactccaggatctgggcaattcatgactactgatgatatgcaatcaccttgtgcactaccctggtaccatcctactaaagaaatatctattccgggtgaagttaaaaaccttatagaaatgtgtcaagttgataccttgattccagtcaataatgtgggtaacaatgttggaaatgtcagtatgtacactgtacaactagggaaccaaacaggcatggcacaaaaagtcttttcaataaaagtagacattacatcacagcctttggctacaactttaattggggagattgcaagctattacacccattggactggcagtctgcgatttagttttatgttttgtgggactgcaaacacaacacttaaattattacttgcatacacaccacctggtattgatgaaccaacaactagaaaggatgcaatgctagggacacatgttgtgtgggatgttggattgcagtctactatatctcttgttgtaccatgggtgagtgccagccacttcaggttaactgcagataataaatactccatggctggttatatcacatgttggtaccaaactaatttagtagtgcccccaagtacgccacagactgctgatatgctgtgttttgtttctgcatgtaaagatttttgtctacgaatggcaagggatacagatttacacatacaaagtggtccaatagagcaaaatccagtagaaaactacattgatgaagttttaaatgaagttttagtagtgccgaatataaaagaaagtcatcacactacatcaaactctgccccacttttagatgctgcagagacgggacacaccagtaatgttcaaccagaagatgctatagagacaaggtatgttataacatcacaaacaagagatgagatgagtatagaaagtttccttggtagatctggttgtgtccacatctcaagaataaaggttgattacactgactataatggacaggacataaatttcacaaaatggaaaatcacactacaggaaatggcacagattaggagaaaatttgaattgtttacatatgtcaggtttgactcagaaataaccttggtgccttgtattgctggtagaggagacgacattggacatattgtaatgcaatatatgtatgttcctccaggagctccaattccttcaaaaagaaacgatttctcatggcaatcaggcaccaatatgtcaatattctggcaacatggacagccatttcctagattttctttaccatttcttagcattgcatcagcttattatatgttttatgatggatatgatggagacaacacttcttccaagtatggtagcgtagttactaatgatatgggtactatatgctctagaaacttacatctgttcaattctgaaatgcatgattcaattttgatttcatactcttctgatttaatcatataccgcacaaacactataggtgatgattatattcccaattgtaactgcactgaggctacttattattgtagacacaaaaataggtattacccaataaaagttactccacatgattggtatgaaatacaagagagtgaatattaccccaaacacatccaatacaacctattaattggtgaaggaccatgtgaacctggtgattgtggtggaaaacttctttgtagacatggtgtcattggcataatcacagcaggtggtgaaggtcatgtagcatttatagatcttagacaatttcactgtgctgaggaacaaggcataactgattacatacacatgttgggagaggcttttggcaatggttttgtagatagtgttaaagaacaaataaatgcaataaatccaatcaataacattagtaagaaggttattaagtggctacttagaataatctcggctatggttattataatcagaaactcctctgaccctcaaacgatcatagcaaccttgacactaattggttgcaatggttcaccatggagatttctcaaagaaaagttttgcaaatggacccaattaacttatatccacaaagagtctgattcatggcttaagaaattcactgaaatgtgtaatgctgcacgtggtcttgaatggattggtaataaaatttcaaaatttatagattggatgaaatctatgctaccccaggcccaattgaaagttaaatacttgaatgaaataaagaaactcagtttgcttgaaaaacagattgaaaatctacgtgcggcagatagtgcaacacaagagaaaatcaaatgtgaaattgacaccctacatgatctatcgtgcaaatttcttcctttgtatgcacatgaggcaaaaagaatcaaagtgctttataataaatgttccaatataattaaacaaagaaagagaagtgaaccggtggcggtgatgatacatggaccacccggtactggtaaatctataacaactaacttcttggctagaatgataacaaatgaaagtgatgtgtactcattacctccagatcccaaatattttgatggttatgacaatcagagtgttgtaatcatggatgatattatgcaaaatccagatggagaagacatgacactattttgccaaatggtttcaagtgttacatttataccacccatggctgatttgcctgacaagggtaaaccatttgattcaagatttatcttatgtagtactaaccactcgcttttagccccacctactatatcttcattacccgcaatgaatagaagatttttctttgacttagatattgtagttcatgacaattataaagatacacaagggaaattagatgtatccaaagcttttcgaccttgtaatgttaacaccaaaattggcaatgcaagatgttgtccatttgtatgtggtaaggcagtgacattcaaagatcgcagcacttgctcaacatacaccttagctcaagtttacaatcacattttggaagaagacaaaagaaggagacaggtggtggatgtcatgtctgcaattttccaaggaccaatttctttagacgctccaccaccaccagctatagcagatctgttacaatcagttagaacacctgaggtaatcaagtactgtcaagataataaatggatcattccagcagagtgccaagtggaaagagacttaaatatagccagtagcataatagctattatagcaaatataataagtatagctggcattatacttgtaatttataaattgttttgttcattacaaggaccatactcaggtgaacctaaacctaaaaccaaagtacctgaaagaagagtagttgctcaaggtccagaagaagaatttggaaggtcaattctcaaaaacaatacttgtgtgattactacaggtaatggaaaatttacaggtcttggtatacatgacagaattctaatcatcccaacacatgctgatccaggtagagaggtccaagttaatggtgtccacactaaggttctagactcatatgatctttataatagagatggagttaaacttgaaataacggtcatacaattagatagaaatgaaaaatttagggacattagaaagtatatacctgaaacagaagacgattatccagaatgcaatttggcactttcagctaatcaagatgaaccaactataattaaagtaggagatgtagtgtcctatggcaatattttgcttagtggaaatcaaacagccagaatgcttaaatataattaccccacaaaatctgggtattgtggaggggtactatataaaattggtcaaattctaggtattcatgtgggtggaaatggaagggatggtttttcagccatgttacttagatcatactttacagatactcagggccaaattaaagtcaataagcatgctactgaatgtggtcttccaactatacacactcctagcaaaaccaaacttcagcctagtgtattttatgatgtcttcccaggttctaaggaaccagctgtgctcacagataatgaccctagattggaagttaattttaaagaagctttattttctaaatataaaggtaatgtggaatgtaatttgaatgaacatatggaaattgctattgcccattactcagcacaattaatgacactagatattgattccaggccaatagcattggaagatagcgtgtttggaatagaaggacttgaggctttagatctaaacaccagtgcagggtttccttatgtcacaatgggtattaaaaagagagatttaataaataacaaaacaaaagatatatccaggcttaaagaggctctagataaatatggagttgacttacccatgatcactttcttaaaagacgagcttaggaaaaaggagaaaatttcaacaggtaaaactagagttatagaagcaagtagtataaatgacacaatattatttagaactacttttggcaatttgttctctaagtttcatttaaacccaggcgttgttactggctctgcagtagggtgtgaccctgagactttctggtctaaaatcccagttatgcttgatggagattgtataatggcttttgactatacaaattatgatggtagtatacaccctgtctggtttcaagctctgaaaaaagttcttgaaaatttatctttccaatctaatttaattgatagattgtgttattccaagcacttgtttaaatcaacatattatgaagtggcaggtggagttccttctgggtgttctggaaccagtatattcaatactatgattaataacattataataagaacactagttctagatgcatacaaaaatattgatctggacaagcttaaaataattgcatatggtgatgatgtgattttctcttataaatatactctagatatggaagctattgctaatgaaggaaagaaatatggacttacaataacaccagcagataagtccaatgaattcaagaaacttgattatagtaatgtgacttttcttaaacgtggttttaagcaagatgaaagacatacattccttattcatcctacattcccagtggaagagatacatgaatcaattagatggaccaagaaaccttcacagatgcaagaacatgtgctatcattatgtcacctgatgtggcacaatggacgtaaggtgtatgaagatttctctagtaagatacgcagtgtcagcgctggacgtgcactgtatatcccaccttatgatctgttgaaacatgaatggtatgaaaaattttagatatagaaataatgaatgaatgattctttaattctataaaaaaaaaaaaaaaaaaaaaaaaaaaaaaa

SEQ ID NO: 58 - DNA, 7087 bp, Artificial Sequence
  Synthetic sequence
ttaaaactgggtgtgggttgttcccacccacaccacccaatgggtgttgtactctgttattccggtaactttgtacgccagtttttccctcccctccccatccttttacgtaacttagaagttttaaatacaagaccaatagtaggcaactctccaggttgtctaaggtcaagcacttctgtttccccggttgatgttgatatgctccaacagggcaaaaacaacagataccgttatccgcaaagtgcctacacagagcttagtaggattctgaaagatctttggttggtcgttcagctgcatacccagcagtagaccttgcagatgaggctggacattccccactggtaacagtggtccagcctgcgtggctgcctgcgcacctctcatgaggtgtgaagccaaagatcggacagggtgtgaagagccgcgtgtgctcactttgagtcctccggcccctgaatgcggctaaccttaaacctgcagccatggctcataagccaatgagtttatggtcgtaatgagtaattgcgggatgggaccgactactttgggtgtccgtgtttcactttttcctttattaattgcttatggtgacaatatatatattgatatatattggcatcatgggcgcccaggtatctagacaaaatgttggtacacactcaacccaaaattcagtgtcaaatggatcaagtttaaattactttaatataaattacttcaaggatgctgcctcaagtggtgcatctagattagatttctctcaagatccaagcaaattcactgacccagttaaagatgtcttagaaaaggggatcccaacactacaatcaccatctgttgaggcttgtggctattcagacaggattatgcaaataaccagaggagattcaacaatcacatctcaagatgtagcaaatgctgtggttgggtatggggtctggccgcattacttaacaccacaagatgccactgctatagacaaaccaacacaacctgatacatcatcaaatagattttatacactagagagtaaacattggaatggtagttcaaaaggatggtggtggaaattaccagatgctcttaaagacatgggtatttttggagaaaatatgtattatcatttcctgggtagaagtggatatacagttcatgtgcagtgtaatgctagtaaattccatcagggtaccttgttagttgtaatgataccagaacaccagctagcaagtgcaaaacacggaagtgtgactgctggttacgaactcacacacccaggtgaggctggcagagatgtaagtcaagaacgtgatgcaagtttaagacaacctagtgatgatagttggcttaattttgatggcacccttcttggaaatttattaattttcccacatcaatttataaaccttaggagtaataattctgcaactctaatagtaccatatgtaaatgctgtgccaatggattcaatgcttcgacataataactggagcctggtcatcataccaattagtccattacgtagtgaaactacatcttctaatatagtgccaatcactgtatcaataagtcccatgtgtgctgaattttctggtgcaagagcaaaaaacattaaacaaggattacctgtatatataactccaggatctgggcaattcatgactactgatgatatgcaatcaccttgtgcactaccctggtaccatcctactaaagaaatatctattccgggtgaagttaaaaaccttatagaaatgtgtcaagttgataccttgattccagtcaataatgtgggtaacaatgttggaaatgtcagtatgtacactgtacaactagggaaccaaacaggcatggcacaaaaagtcttttcaataaaagtagacattacatcacagcctttggctacaactttaattggggagattgcaagctattacacccattggactggcagtctgcgatttagttttatgttttgtgggactgcaaacacaacacttaaattattacttgcatacacaccacctggtattgatgaaccaacaactagaaaggatgcaatgctagggacacatgttgtgtgggatgttggattgcagtctactatatctcttgttgtaccatgggtgagtgccagccacttcaggttaactgcagataataaatactccatggctggttatatcacatgttggtaccaaactaatttagtagtgcccccaagtacgccacagactgctgatatgctgtgttttgtttctgcatgtaaagatttttgtctacgaatggcaagggatacagatttacacatacaaagtggtccaatagagcaaaatccagtagaaaactacattgatgaagttttaaatgaagttttagtagtgccgaatataaaagaaagtcatcacactacatcaaactctgccccacttttagatgctgcagagacgggacacaccagtaatgttcaaccagaagatgctatagagacaaggtatgttataacatcacaaacaagagatgagatgagtatagaaagtttccttggtagatctggttgtgtccacatctcaagaataaaggttgattacactgactataatggacaggacataaatttcacaaaatggaaaatcacactacaggaaatggcacagattaggagaaaatttgaattgtttacatatgtcaggtttgactcagaaataaccttggtgccttgtattgctggtagaggagacgacattggacatattgtaatgcaatatatgtatgttcctccaggagctccaattccttcaaaaagaaacgatttctcatggcaatcaggcaccaatatgtcaatattctggcaacatggacagccatttcctagattttctttaccatttcttagcattgcatcagcttattatatgttttatgatggatatgatggagacaacacttcttccaagtatggtagcgtagttactaatgatatgggtactatatgctcaagaatagttacagaaaaacagaaacattctgttgtcatcacaacacacatatatcataaagctaaacacacaaaagcttggtgtcctaggccccctagagctgtcccttacacacatagtcatgtgactaattatatgccagaaacaggtgacgtgacaacagccatagtccgcagaaacactataacaactgctgggcccagtgatctatatgtgcatgtaggtaacttaatatatagaaacttacatctgttcaattctgaaatgcatgattcaattttgatttcatactcttctgatttaatcatataccgcacaaacactataggtgatgattatattcccaattgtaactgcactgaggctacttattattgtagacacaaaaataggtattacccaataaaagttactccacatgattggtatgaaatacaagagagtgaatattaccccaaacacatccaatacaacctattaattggtgaaggtcatgtagcatttatagatcttagacaatttcactgtgctgaggaacaaggcataactgattacatacacatgttgggagaggcttttggcaatggttttgtagatagtgttaaagaacaaataaatgcaataaatccaatcaataacattagtaagaaggttattaagtggctacttagaataatctcggctatggttattataatcagaaactcctctgaccctcaaacgatcatagcaaccttgacactaattggttgcaatggttcaccatggagatttctcaaagaaaagttttgcaaatggacccaattaacttatatccacaaagagtctgattcatggcttaagaaattcactgaaatgtgtaatgctgcacgtggtcttgaatggattggtaataaaatttcaaaatttatagattggatgaaatctatgctaccccaggcccaattgaaagttaaatacttgaatgaaataaagaaactcagtttgcttgaaaaacagattgaaaatctacgtgcggcagatagtgcaacacaagagaaaatcaaatgtgaaattgacaccctacatgatctatcgtgcaaatttcttcctttgtatgcacatgaggcaaaaagaatcaaagtgctttataataaatgttccaatataattaaacaaagaaagagaagtgaaccggtggcggtgatgatacatggaccacccggtactggtaaatctataacaactaacttcttggctagaatgataacaaatgaaagtgatgtgtactcattacctccagatcccaaatattttgatggttatgacaatcagagtgttgtaatcatggatgatattatgcaaaatccagatggagaagacatgacactattttgccaaatggtttcaagtgttacatttataccacccatggctgatttgcctgacaagggtaaaccatttgattcaagatttatcttatgtagtactaaccactcgcttttagccccacctactatatcttcattacccgcaatgaatagaagatttttctttgacttagatattgtagttcatgacaattataaagatacacaagggaaattagatgtatccaaagcttttcgaccttgtaatgttaacaccaaaattggcaatgcaagatgttgtccatttgtatgtggtaaggcagtgacattcaaagatcgcagcacttgctcaacatacaccttagctcaagtttacaatcacattttggaagaagacaaaagaaggagacaggtggtggatgtcatgtctgcaattttccaaggaccaatttctttagacgctccaccaccaccagctatagcagatctgttacaatcagttagaacacctgaggtaatcaagtactgtcaagataataaatggatcattccagcagagtgccaagtggaaagagacttaaatatagccagtagcataatagctattatagcaaatataataagtatagctggcattatacttgtaatttataaattgttttgttcattacaaggaccatactcaggtgaacctaaacctaaaaccaaagtacctgaaagaagagtagttgctcaaggtccagaagaagaatttggaaggtcaattctcaaaaacaatacttgtgtgattactacaggtaatggaaaatttacaggtcttggtatacatgacagaattctaatcatcccaacacatgctgatccaggtagagaggtccaagttaatggtgtccacactaaggttctagactcatatgatctttataatagagatggagttaaacttgaaataacggtcatacaattagatagaaatgaaaaatttagggacattagaaagtatatacctgaaacagaagacgattatccagaatgcaatttggcactttcagctaatcaagatgaaccaactataattaaagtaggagatgtagtgtcctatggcaatattttgcttagtggaaatcaaacagccagaatgcttaaatataattaccccacaaaatctgggtattgtggaggggtactatataaaattggtcaaattctaggtattcatgtgggtggaaatggaagggatggtttttcagccatgttacttagatcatactttacagatactcagggccaaattaaagtcaataagcatgctactgaatgtggtcttccaactatacacactcctagcaaaaccaaacttcagcctagtgtattttatgatgtcttcccaggttctaaggaaccagctgtgctcacagataatgaccctagattggaagttaattttaaagaagctttattttctaaatataaaggtaatgtggaatgtaatttgaatgaacatatggaaattgctattgcccattactcagcacaattaatgacactagatattgattccaggccaatagcattggaagatagcgtgtttggaatagaaggacttgaggctttagatctaaacaccagtgcagggtttccttatgtcacaatgggtattaaaaagagagatttaataaataacaaaacaaaagatatatccaggcttaaagaggctctagataaatatggagttgacttacccatgatcactttcttaaaagacgagcttaggaaaaaggagaaaatttcaacaggtaaaactagagttatagaagcaagtagtataaatgacacaatattatttagaactacttttggcaatttgttctctaagtttcatttaaacccaggcgttgttactggctctgcagtagggtgtgaccctgagactttctggtctaaaatcccagttatgcttgatggagattgtataatggcttttgactatacaaattatgatggtagtatacaccctgtctggtttcaagctctgaaaaaagttcttgaaaatttatctttccaatctaatttaattgatagattgtgttattccaagcacttgtttaaatcaacatattatgaagtggcaggtggagttccttctgggtgttctggaaccagtatattcaatactatgattaataacattataataagaacactagttctagatgcatacaaaaatattgatctggacaagcttaaaataattgcatatggtgatgatgtgattttctcttataaatatactctagatatggaagctattgctaatgaaggaaagaaatatggacttacaataacaccagcagataagtccaatgaattcaagaaacttgattatagtaatgtgacttttcttaaacgtggttttaagcaagatgaaagacatacattccttattcatcctacattcccagtggaagagatacatgaatcaattagatggaccaagaaaccttcacagatgcaagaacatgtgctatcattatgtcacctgatgtggcacaatggacgtaaggtgtatgaagatttctctagtaagatacgcagtgtcagcgctggacgtgcactgtatatcccaccttatgatctgttgaaacatgaatggtatgaaaaattttagatatagaaataatgaatgaatgattctttaattctataaaaaaaaaaaaaaaaaaaaaaaaaaaaaaa

SEQ ID NO: 59 - DNA, 7087 bp, Artificial Sequence
  Synthetic sequence
ttaaaactgggtgtgggttgttcccacccacaccacccaatgggtgttgtactctgttattccggtaactttgtacgccagtttttccctcccctccccatccttttacgtaacttagaagttttaaatacaagaccaatagtaggcaactctccaggttgtctaaggtcaagcacttctgtttccccggttgatgttgatatgctccaacagggcaaaaacaacagataccgttatccgcaaagtgcctacacagagcttagtaggattctgaaagatctttggttggtcgttcagctgcatacccagcagtagaccttgcagatgaggctggacattccccactggtaacagtggtccagcctgcgtggctgcctgcgcacctctcatgaggtgtgaagccaaagatcggacagggtgtgaagagccgcgtgtgctcactttgagtcctccggcccctgaatgcggctaaccttaaacctgcagccatggctcataagccaatgagtttatggtcgtaatgagtaattgcgggatgggaccgactactttgggtgtccgtgtttcactttttcctttattaattgcttatggtgacaatatatatattgatatatattggcatcatgggcgcccaggtatctagacaaaatgttggtacacactcaacccaaaattcagtgtcaaatggatcaagtttaaattactttaatataaattacttcaaggatgctgcctcaagtggtgcatctagattagatttctctcaagatccaagcaaattcactgacccagttaaagatgtcttagaaaaggggatcccaacactacaatcaccatctgttgaggcttgtggctattcagacaggattatgcaaataaccagaggagattcaacaatcacatctcaagatgtagcaaatgctgtggttgggtatggggtctggccgcattacttaacaccacaagatgccactgctatagacaaaccaacacaacctgatacatcatcaaatagattttatacactagagagtaaacattggaatggtagttcaaaaggatggtggtggaaattaccagatgctcttaaagacatgggtatttttggagaaaatatgtattatcatttcctgggtagaagtggatatacagttcatgtgcagtgtaatgctagtaaattccatcagggtaccttgttagttgtaatgataccagaacaccagctagcaagtgcaaaacacggaagtgtgactgctggttacgaactcacacacccaggtgaggctggcagagatgtaagtcaagaacgtgatgcaagtttaagacaacctagtgatgatagttggcttaattttgatggcacccttcttggaaatttattaattttcccacatcaatttataaaccttaggagtaataattctgcaactctaatagtaccatatgtaaatgctgtgccaatggattcaatgcttcgacataataactggagcctggtcatcataccaattagtccattacgtagtgaaactacatcttctaatatagtgccaatcactgtatcaataagtcccatgtgtgctgaattttctggtgcaagagcaaaaaacattaaacaaggattacctgtatatataactccaggatctgggcaattcatgactactgatgatatgcaatcaccttgtgcactaccctggtaccatcctactaaagaaatatctattccgggtgaagttaaaaaccttatagaaatgtgtcaagttgataccttgattccagtcaataatgtgggtaacaatgttggaaatgtcagtatgtacactgtacaactagggaaccaaacaggcatggcacaaaaagtcttttcaataaaagtagacattacatcacagcctttggctacaactttaattggggagattgcaagctattacacccattggactggcagtctgcgatttagttttatgttttgtgggactgcaaacacaacacttaaattattacttgcatacacaccacctggtattgatgaaccaacaactagaaaggatgcaatgctagggacacatgttgtgtgggatgttggattgcagtctactatatctcttgttgtaccatgggtgagtgccagccacttcaggttaactgcagataataaatactccatggctggttatatcacatgttggtaccaaactaatttagtagtgcccccaagtacgccacagactgctgatatgctgtgttttgtttctgcatgtaaagatttttgtctacgaatggcaagggatacagatttacacatacaaagtggtccaatagagcaaaatccagtagaaaactacattgatgaagttttaaatgaagttttagtagtgccgaatataaaagaaagtcatcacactacatcaaactctgccccacttttagatgctgcagagacgggacacaccagtaatgttcaaccagaagatgctatagagacaaggtatgttataacatcacaaacaagagatgagatgagtatagaaagtttccttggtagatctggttgtgtccacatctcaagaataaaggttgattacactgactataatggacaggacataaatttcacaaaatggaaaatcacactacaggaaatggcacagattaggagaaaatttgaattgtttacatatgtcaggtttgactcagaaataaccttggtgccttgtattgctggtagaggagacgacattggacatattgtaatgcaatatatgtatgttcctccaggagctccaattccttcaaaaagaaacgatttctcatggcaatcaggcaccaatatgtcaatattctggcaacatggacagccatttcctagattttctttaccatttcttagcattgcatcagcttattatatgttttatgatggatatgatggagacaacacttcttccaagtatggtagcgtagttactaatgatatgggtactatatgctcaagaatagttacagaaaaacagaaacattctgttgtcatcacaacacacatatatcataaagctaaacacacaaaagcttggtgtcctaggccccctagagctgtcccttacacacatagtcatgtgactaattatatgccagaaacaggtgacgtgacaacagccatagtccgcagaaacactataacaactgctgggcccagtgatctatatgtgcatgtaggtaacttaatatatagaaacttacatctgttcaattctgaaatgcatgattcaattttgatttcatactcttctgatttaatcatataccgcacaaacactataggtgatgattatattcccaattgtaactgcactgaggctacttattattgtagacacaaaaataggtattacccaataaaagttactccacatgattggtatgaaatacaagagagtgaatattaccccaaacacatccaatacaacctattaattggtgaaggaccatgtgaacctggtgattgtggtggaaaacttctttgtagacatggtgtcattggcataatcacagcaggtggtgaaggtcatgtagcatttatagatcttagacaatttcactgtgctgaggaacaaggcataactgattacatacacatgttgggagaggcttttggcaatggttttgtagatagtgttaaagaacaaataaatgcaataaatccaatcaataacattagtaagaaggttattaagtggctacttagaataatctcggctatggttattataatcagaaactcctctgaccctcaaacgatcatagcaaccttgacactaattggttgcaatggttcaccatggagatttctcaaagaaaagttttgcaaatggacccaattaacttatatccacaaagagtctgattcatggcttaagaaattcactgaaatgtgtaatgctgcacgtggtcttgaatggattggtaataaaatttcaaaatttatagattggatgaaatctatgctaccccaggcccaattgaaagttaaatacttgaatgaaataaagaaactcagtttgcttgaaaaacagattgaaaatctacgtgcggcagatagtgcaacacaagagaaaatcaaatgtgaaattgacaccctacatgatctatcgtgcaaatttcttcctttgtatgcacatgaggcaaaaagaatcaaagtgctttataataaatgttccaatataattaaacaaagaaagagaagtgaaccggtggcggtgatgatacatggaccacccggtactggtaaatctataacaactaacttcttggctagaatgataacaaatgaaagtgatgtgtactcattacctccagatcccaaatattttgatggttatgacaatcagagtgttgtaatcatggatgatattatgcaaaatccagatggagaagacatgacactattttgccaaatggtttcaagtgttacatttataccacccatggctgatttgcctgacaagggtaaaccatttgattcaagatttatcttatgtagtactaaccactcgcttttagccccacctactatatcttcattacccgcaatgaatagaagatttttctttgacttagatattgtagttcatgacaattataaagatacacaagggaaattagatgtatccaaagcttttcgaccttgtaatgttaacaccaaaattggcaatgcaagatgttgtccatttgtatgtggtaaggcagtgacattcaaagatcgcagcacttgctcaacatacaccttagctcaagtttacaatcacattttggaagaagacaaaagaaggagacaggtggtggatgtcatgtctgcaattttccaaggaccaatttctttagacgctccaccaccaccagctatagcagatctgttacaatcagttagaacacctgaggtaatcaagtactgtcaagataataaatggatcattccagcagagtgccaagtggataaattgttttgttcattacaaggaccatactcaggtgaacctaaacctaaaaccaaagtacctgaaagaagagtagttgctcaaggtccagaagaagaatttggaaggtcaattctcaaaaacaatacttgtgtgattactacaggtaatggaaaatttacaggtcttggtatacatgacagaattctaatcatcccaacacatgctgatccaggtagagaggtccaagttaatggtgtccacactaaggttctagactcatatgatctttataatagagatggagttaaacttgaaataacggtcatacaattagatagaaatgaaaaatttagggacattagaaagtatatacctgaaacagaagacgattatccagaatgcaatttggcactttcagctaatcaagatgaaccaactataattaaagtaggagatgtagtgtcctatggcaatattttgcttagtggaaatcaaacagccagaatgcttaaatataattaccccacaaaatctgggtattgtggaggggtactatataaaattggtcaaattctaggtattcatgtgggtggaaatggaagggatggtttttcagccatgttacttagatcatactttacagatactcagggccaaattaaagtcaataagcatgctactgaatgtggtcttccaactatacacactcctagcaaaaccaaacttcagcctagtgtattttatgatgtcttcccaggttctaaggaaccagctgtgctcacagataatgaccctagattggaagttaattttaaagaagctttattttctaaatataaaggtaatgtggaatgtaatttgaatgaacatatggaaattgctattgcccattactcagcacaattaatgacactagatattgattccaggccaatagcattggaagatagcgtgtttggaatagaaggacttgaggctttagatctaaacaccagtgcagggtttccttatgtcacaatgggtattaaaaagagagatttaataaataacaaaacaaaagatatatccaggcttaaagaggctctagataaatatggagttgacttacccatgatcactttcttaaaagacgagcttaggaaaaaggagaaaatttcaacaggtaaaactagagttatagaagcaagtagtataaatgacacaatattatttagaactacttttggcaatttgttctctaagtttcatttaaacccaggcgttgttactggctctgcagtagggtgtgaccctgagactttctggtctaaaatcccagttatgcttgatggagattgtataatggcttttgactatacaaattatgatggtagtatacaccctgtctggtttcaagctctgaaaaaagttcttgaaaatttatctttccaatctaatttaattgatagattgtgttattccaagcacttgtttaaatcaacatattatgaagtggcaggtggagttccttctgggtgttctggaaccagtatattcaatactatgattaataacattataataagaacactagttctagatgcatacaaaaatattgatctggacaagcttaaaataattgcatatggtgatgatgtgattttctcttataaatatactctagatatggaagctattgctaatgaaggaaagaaatatggacttacaataacaccagcagataagtccaatgaattcaagaaacttgattatagtaatgtgacttttcttaaacgtggttttaagcaagatgaaagacatacattccttattcatcctacattcccagtggaagagatacatgaatcaattagatggaccaagaaaccttcacagatgcaagaacatgtgctatcattatgtcacctgatgtggcacaatggacgtaaggtgtatgaagatttctctagtaagatacgcagtgtcagcgctggacgtgcactgtatatcccaccttatgatctgttgaaacatgaatggtatgaaaaattttagatatagaaataatgaatgaatgattctttaattctataaaaaaaaaaaaaaaaaaaaaaaaaaaaaaa

SEQ ID NO: 60 - DNA, 7156 bp, Artificial Sequence
  Synthetic sequence
ttaaaactgggtgtgggttgttcccacccacaccacccaatgggtgttgtactctgttattccggtaactttgtacgccagtttttccctcccctccccatccttttacgtaacttagaagttttaaatacaagaccaatagtaggcaactctccaggttgtctaaggtcaagcacttctgtttccccggttgatgttgatatgctccaacagggcaaaaacaacagataccgttatccgcaaagtgcctacacagagcttagtaggattctgaaagatctttggttggtcgttcagctgcatacccagcagtagaccttgcagatgaggctggacattccccactggtaacagtggtccagcctgcgtggctgcctgcgcacctctcatgaggtgtgaagccaaagatcggacagggtgtgaagagccgcgtgtgctcactttgagtcctccggcccctgaatgcggctaaccttaaacctgcagccatggctcataagccaatgagtttatggtcgtaatgagtaattgcgggatgggaccgactactttgggtgtccgtgtttcactttttcctttattaattgcttatggtgacaatatatatattgatatatattggcatcatgggcgcccaggtatctagacaaaatgttggtacacactcaacccaaaattcagtgtcaaatggatcaagtttaaattactttaatataaattacttcaaggatgctgcctcaagtggtgcatctagattagatttctctcaagatccaagcaaattcactgacccagttaaagatgtcttagaaaaggggatcccaacactacaatcaccatctgttgaggcttgtggctattcagacaggattatgcaaataaccagaggagattcaacaatcacatctcaagatgtagcaaatgctgtggttgggtatggggtctggccgcattacttaacaccacaagatgccactgctatagacaaaccaacacaacctgatacatcatcaaatagattttatacactagagagtaaacattggaatggtagttcaaaaggatggtggtggaaattaccagatgctcttaaagacatgggtatttttggagaaaatatgtattatcatttcctgggtagaagtggatatacagttcatgtgcagtgtaatgctagtaaattccatcagggtaccttgttagttgtaatgataccagaacaccagctagcaagtgcaaaacacggaagtgtgactgctggttacgaactcacacacccaggtgaggctggcagagatgtaagtcaagaacgtgatgcaagtttaagacaacctagtgatgatagttggcttaattttgatggcacccttcttggaaatttattaattttcccacatcaatttataaaccttaggagtaataattctgcaactctaatagtaccatatgtaaatgctgtgccaatggattcaatgcttcgacataataactggagcctggtcatcataccaattagtccattacgtagtgaaactacatcttctaatatagtgccaatcactgtatcaataagtcccatgtgtgctgaattttctggtgcaagagcaaaaaacattaaacaaggattacctgtatatataactccaggatctgggcaattcatgactactgatgatatgcaatcaccttgtgcactaccctggtaccatcctactaaagaaatatctattccgggtgaagttaaaaaccttatagaaatgtgtcaagttgataccttgattccagtcaataatgtgggtaacaatgttggaaatgtcagtatgtacactgtacaactagggaaccaaacaggcatggcacaaaaagtcttttcaataaaagtagacattacatcacagcctttggctacaactttaattggggagattgcaagctattacacccattggactggcagtctgcgatttagttttatgttttgtgggactgcaaacacaacacttaaattattacttgcatacacaccacctggtattgatgaaccaacaactagaaaggatgcaatgctagggacacatgttgtgtgggatgttggattgcagtctactatatctcttgttgtaccatgggtgagtgccagccacttcaggttaactgcagataataaatactccatggctggttatatcacatgttggtaccaaactaatttagtagtgcccccaagtacgccacagactgctgatatgctgtgttttgtttctgcatgtaaagatttttgtctacgaatggcaagggatacagatttacacatacaaagtggtccaatagagcaaaatccagtagaaaactacattgatgaagttttaaatgaagttttagtagtgccgaatataaaagaaagtcatcacactacatcaaactctgccccacttttagatgctgcagagacgggacacaccagtaatgttcaaccagaagatgctatagagacaaggtatgttataacatcacaaacaagagatgagatgagtatagaaagtttccttggtagatctggttgtgtccacatctcaagaataaaggttgattacactgactataatggacaggacataaatttcacaaaatggaaaatcacactacaggaaatggcacagattaggagaaaatttgaattgtttacatatgtcaggtttgactcagaaataaccttggtgccttgtattgctggtagaggagacgacattggacatattgtaatgcaatatatgtatgttcctccaggagctccaattccttcaaaaagaaacgatttctcatggcaatcaggcaccaatatgtcaatattctggcaacatggacagccatttcctagattttctttaccatttcttagcattgcatcagcttattatatgttttatgatggatatgatggagacaacacttcttccaagtatggtagcgtagttactaatgatatgggtactatatgctcaagaatagttacagaaaaacagaaacattctgttgtcatcacaacacacatatatcataaagctaaacacacaaaagcttggtgtcctaggccccctagagctgtcccttacacacatagtcatgtgactaattatatgccagaaacaggtgacgtgacaacagccatagtccgcagaaacactataacaactgctgggcccagtgatctatatgtgcatgtaggtaacttaatatatagaaacttacatctgttcaattctgaaatgcatgattcaattttgatttcatactcttctgatttaatcatataccgcacaaacactataggtgatgattatattcccaattgtaactgcactgaggctacttattattgtagacacaaaaataggtattacccaataaaagttactccacatgattggtatgaaatacaagagagtgaatattaccccaaacacatccaatacaacctattaattggtgaaggaccatgtgaacctggtgattgtggtggaaaacttctttgtagacatggtgtcattggcataatcacagcaggtggtgaaggtcatgtagcatttatagatcttagacaatttcactgtgctgaggaacaaggcataactgattacatacacatgttgggagaggcttttggcaatggttttgtagatagtgttaaagaacaaataaatgcaataaatccaatcaataacattagtaagaaggttattaagtggctacttagaataatctcggctatggttattataatcagaaactcctctgaccctcaaacgatcatagcaaccttgacactaattggttgcaatggttcaccatggagatttctcaaagaaaagttttgcaaatggacccaattaacttatatccacaaagagtctgattcatggcttaagaaattcactgaaatgtgtaatgctgcacgtggtcttgaatggattggtaataaaatttcaaaatttatagattggatgaaatctatgctaccccaggcccaattgaaagttaaatacttgaatgaaataaagaaactcagtttgcttgaaaaacagattgaaaatctacgtgcggcagatagtgcaacacaagagaaaatcaaatgtgaaattgacaccctacatgatctatcgtgcaaatttcttcctttgtatgcacatgaggcaaaaagaatcaaagtgctttataataaatgttccaatataattaaacaaagaaagagaagtgaaccggtggcggtgatgatacatggaccacccggtactggtaaatctataacaactaacttcttggctagaatgataacaaatgaaagtgatgtgtactcattacctccagatcccaaatattttgatggttatgacaatcagagtgttgtaatcatggatgatattatgcaaaatccagatggagaagacatgacactattttgccaaatggtttcaagtgttacatttataccacccatggctgatttgcctgacaagggtaaaccatttgattcaagatttatcttatgtagtactaaccactcgcttttagccccacctactatatcttcattacccgcaatgaatagaagatttttctttgacttagatattgtagttcatgacaattataaagatacacaagggaaattagatgtatccaaagcttttcgaccttgtaatgttaacaccaaaattggcaatgcaagatgttgtccatttgtatgtggtaaggcagtgacattcaaagatcgcagcacttgctcaacatacaccttagctcaagtttacaatcacattttggaagaagacaaaagaaggagacaggtggtggatgtcatgtctgcaattttccaaggaccaatttctttagacgctccaccaccaccagctatagcagatctgttacaatcagttagaacacctgaggtaatcaagtactgtcaagataataaatggatcattccagcagagtgccaagtggaaagagacttaaatatagccagtagcataatagctattatagcaaatataataagtatagctggcattatacttgtaatttataaattgttttgttcattacaaggaccatactcaggtgaacctaaacctaaaaccaaagtacctgaaagaagagtagttgctcaaggtccagaagaagaatttggaaggtcaattctcaaaaacaatacttgtgtgattactacaggtaatggaaaatttacaggtcttggtatacatgacagaattctaatcatcccaacacatgctgatccaggtagagaggtccaagttaatggtgtccacactaaggttctagactcatatgatctttataatagagatggagttaaacttgaaataacggtcatacaattagatagaaatgaaaaatttagggacattagaaagtatatacctgaaacagaagacgattatccagaatgcaatttggcactttcagctaatcaagatgaaccaactataattaaagtaggagatgtagtgtcctatggcaatattttgcttagtggaaatcaaacagccagaatgcttaaatataattaccccacaaaatctgggtattgtggaggggtactatataaaattggtcaaattctaggtattcatgtgggtggaaatggaagggatggtttttcagccatgttacttagatcatactttacagatactcagggccaaattaaagtcaataagcatgctactgaatgtggtcttccaactatacacactcctagcaaaaccaaacttcagcctagtgtattttatgatgtcttccaaccagctgtgctcacagataatgaccctagattggaagttaattttaaagaagctttattttctaaatataaaggtaatgtggaatgtaatttgaatgaacatatggaaattgctattgcccattactcagcacaattaatgacactagatattgattccaggccaatagcattggaagatagcgtgtttggaatagaaggacttgaggctttagatctaaacaccagtgcagggtttccttatgtcacaatgggtattaaaaagagagatttaataaataacaaaacaaaagatatatccaggcttaaagaggctctagataaatatggagttgacttacccatgatcactttcttaaaagacgagcttaggaaaaaggagaaaatttcaacaggtaaaactagagttatagaagcaagtagtataaatgacacaatattatttagaactacttttggcaatttgttctctaagtttcatttaaacccaggcgttgttactggctctgcagtagggtgtgaccctgagactttctggtctaaaatcccagttatgcttgatggagattgtataatggcttttgactatacaaattatgatggtagtatacaccctgtctggtttcaagctctgaaaaaagttcttgaaaatttatctttccaatctaatttaattgatagattgtgttattccaagcacttgtttaaatcaacatattatgaagtggcaggtggagttccttctgggtgttctggaaccagtatattcaatactatgattaataacattataataagaacactagttctagatgcatacaaaaatattgatctggacaagcttaaaataattgcatatggtgatgatgtgattttctcttataaatatactctagatatggaagctattgctaatgaaggaaagaaatatggacttacaataacaccagcagataagtccaatgaattcaagaaacttgattatagtaatgtgacttttcttaaacgtggttttaagcaagatgaaagacatacattccttattcatcctacattcccagtggaagagatacatgaatcaattagatggaccaagaaaccttcacagatgcaagaacatgtgctatcattatgtcacctgatgtggcacaatggacgtaaggtgtatgaagatttctctagtaagatacgcagtgtcagcgctggacgtgcactgtatatcccaccttatgatctgttgaaacatgaatggtatgaaaaattttagatatagaaataatgaatgaatgattctttaattctataaaaaaaaaaaaaaaaaaaaaaaaaaaaaaa

SEQ ID NO: 61 - DNA, 7169 bp, Artificial Sequence
  Synthetic sequence
ttaaaactggatctgggttgttcccacccagatcacctacatggtgttgtacactattattacggtaatcttgtacgccagttttatactccctttcccaaatgtaacttagaagcaaagcaaactgatcaataggggacaatcatccagattgtcaaagatcaagcacttctgtttccccggtcaaagttgatatgctccacaagggcaaaaacaactgagatcgttatccgcaagatgcctacgcaaagcctagtaatacattgaaagatacttggttggtcgctcagctgttaacccaacagtagacctggtagatgaggctagagattcccctccggcgacggagttctagcctgcgtggctgcctgcacacccactgggtgtgaagccaagtattggacaaggtgtgaagagccgcgtgtgctcatcttgagtcctccggcccctgaatgtggctaaccttaaacctgcagccagtgcacacaatccagtgtgtagctggtcgtaatgagcaattgcgggatgggaccaactactttgggtgtccgtgtttcacttttttccttttattattgcttatggtgacaatatatatagcatatatatattgttatcatgggcgctcaagtatctagacagaatgttggtacgcactcaacacaaaatatggtgtcaaatggatccagcctcaattattttaacatcaattatttcaaagatgcagcttccagtggtgcttctcgattggacttctctcaagaccccagtaaattcacagacccagttaaggatgtgttggagaaaggcatacccactctgcaatctccaagtgtagaagcttgtggatactctgatagaataatccaaattacaagaggcgactcaaccataacatctcaagatgttgctaatgcagtggttgggtatggggtatggccacactacctaactccgcaggatgcaacggctatagacaagccaacacaaccagatacatcatcaaataggttttacacactggatagtaaaatgtggaacagtacctccaaaggttggtggtggaaactaccagatgctcttaaagacatgggtatttttggtgaaaatatgttttatcatttcttgggtagaagtggttatacagtgcacgtacagtgcaatgcaagtaaattccaccagggtacactactagtggttatgataccagaacaccagttagctacagtaaataaaggtaatgttaatgcaggttacaaatacacacatcctggtgaagctggtagagaagtgggtacacaagttgaaaatgagaaacaacctagtgatgataattggctaaattttgatggtacattattgggcaatttactgatattcccacaccagtttattaacttaaggagcaataactcagcaactcttatagtaccatatgttaatgctgttccaatggattctatggttagacataacaattggagtttggtaataataccagtttgtcaactacaaagcaacaatatatccaacattgttcccatcactgtttccattagcccaatgtgtgctgaattctctggagcacgtgccaaaacagttgtgcaaggtctaccagtatatgttacaccaggatcaggacaattcatgacaacagatgatatgcaatctccatgtgcactgccttggtaccatccaacaaaagagatctttataccaggagaggttaagaacttgattgaaatgtgtcaggtggatacactcataccaataaatagcacacagtctaacattggcaatgtcagcatgtacacagtaactctatcaccacaaacaaaattagctgaagaaatttttgcaattaaagtagatattgcctcacatcccttagccacaaccctcattggtgagatagcaagttactttacacactggacagggagcctgcgattcagtttcatgttttgcgggactgcaaacactaccttaaaagttttgctagcatatacacccccagggattggtaagcctagaagtagaaaggaagcaatgttagggacacacgtggtgtgggatgtaggtttacaatctacagtgtcattggttgtaccatggatcagtgccagtcagtatagattcactacaccagacacatactcctcagcaggctacattacatgctggtatcaaactaattttgttgttccaccaaacacacctaacactgctgagatgttgtgttttgtatctggatgcaaggacttttgccttcggatggcaagagacacagacctgcacaagcaaacaggaccaataacacaaaatccagtggaaagatatgtagatgaagtcttaaatgaagtgttagtagtgcccaatattaatgagagccaccctaccacatcaaatgcggccccagttttggatgctgctgaaacaggacataccaataagatacagccagaagacactatagaaaccagatatgtgcaatcttcacagacattggatgaaatgagtgtggaaagcttcctaggcagatcggggtgcatccatgaatcagtgttggatattgtggacaattacaatgatcaaagtttcactaaatggaagataaacctgcaagaaatggcacaaattagaagaaaatttgaaatgtttacttatgcaagatttgactctgaaattactatggtaccaagtgtagcagccaaagatggtcacattggtcatatagtcatgcaatatatgtatgtaccaccaggagcacctataccaacaactagaaatgactatgcttggcaatctggaacaaatgcatctgtattttggcagcatgggcaacctttccctcgcttttcacttccctttttgagtattgcatcagcatattacatgttttatgatggttatgatggagacacatataaatccagatatggaactgtagtcaccaatgacatgggaactttgtgttcgcgtattgtgaccagtgagcaattacacaaagtcaaagtggtaacaaggatatatcacaaagccaaacacaccaaagcttggtgcccaagaccacccagagctgttcaatactcacatacacataccaccaactacaaattgagttcagaagtacacaatgatgtggctataagacctagaacaaatctaacaactgttgggcctagtgacatgtatgtgcatgttggtaatctaatatacagaaatctacatttatttaactctgacatacatgattccattttagtgtcttattcatcagatttaatcatataccgaacaagcacacaaggtgatgattatattccaacatgtaattgcactgaagctacatattactgcaaacacaaaaacaggtactacccaattaatgtcacacctcatgactggtatgagatacaagagagtgaatattatccaaaacatatccagtacaatttactaataggtgaaggaccatgtgaaccaggtgattgtggtgggaaattattatgcaaacatggagtgataggtattattacagcaggtggtgagggccatgttgcattcatagatcttagacactttcactgtgctgaagaacaaggaatcactgattacatacacatgctcggcgaagcttttggcagtggatttgtagatagtgttaaagaccagattaattcaataaatcccatcaataacattagcagtaagatggttaaatggatgttaagaattatatcagctatggttataattattagaaactcttcagatccgcaaacaataattgccactttaacactgattggatgcaatggttctccttggagatttctcaaagaaaagttctgtaaatggactcaattaacttatatacacaaagaatcagattcatggctcaaaaaattcactgagatgtgtaatgcagctagggggctagaatggattggaaacaaaatatccaaatttatcgattggatgaaatcaatgctaccccaggcacaattaaaagttaagtatttgagtgaacttaagaaactcaactttctggagaaacaggttgaaaatctcagagcagctgatactaacactcaagaaaaaatcaagtgtgagatagatacattgcatgacttatcctgtaagtttttacctctgtatgccagtgaagcaaagagaattaaagtgttgtatcacaagtgcactaacataattaaacagaagaagagaagtgaacctgtagcagttatgatacacgggcctcctgggaccggaaaatcaatcactacaagcttcctggctagaatgattactaatgagagtgacatatactcacttccaccagaccctaaatattttgatggttatgataaccagagtgtagtaataatggatgacatcatgcaaaaccctggtggtgaggacatgacattattctgtcagatggtatctagtgtgacttttatacccccaatggctgatctaccagataagggaaaaccctttgattctagatttgtattgtgtagtactaatcactcactcttggcacccccaactatatcgtcgctcccagcaatgaatagaagattctatttagatttagatattcttgtgcatgataactacaaagataatcagggtaagttagatgtttctagagcatttcgactatgtgatgttgattcaaagattggaaatgcaaaatgttgtccatttgtatgtggcaaggcagtgacattcaaggaccgcaacacatgtagaacttattcactttcccaaatatacaaccaaattcttgaggaagacaagagaaggagacaggtggttgatgtcatgtctgcaattttccaagggcctatatccatgggtaaacccccaccaccagctataacagaccttttacactcagtaaggacaccagaagtaattaagtactgccaagacaataaatggatagttcctgcggactgccaaattgaaagggatctgaatatagctaatagcataatcacaatcatagctaatatcatcagtatagcagggattatatatataatttataagctcttttgctctctacagggcccttactcgggggagcccaaacctaagacaaaagttcccgagagaagagtggtagctcaaggtccagaagaagaatttggaatgtctattattaaaaataatacctgtgttgtgaccacaacaaatggaaaatttacaggattaggcatttatgacagaatcttaatattaccaacacatgctgacccgggcagtgaaattcaagtaaatggaatacacaccaaagtgcttgattcttatgacttgtttaataaggaaggtgtcaagttggaaattactgtgctaaagttagatagaaatgagaagttcagggatatacgtaagtacatacctgaatcagaagatgactatcctgaatgcaacctagcactagtggccaatcaaacagaaccaactataatcaaagtaggggatgttgtgtcttatggtaatatattacttagtggcacacagacagccagaatgcttaaatataactatcctacaaaatctgggtattgtggtggtgtgttatacaagattggccagatcttaggtatacatgtgggtggcaatggtagagatgggttttcatctatgctattgagatcatacttcactgaacaacaaggccaaattcaaatctctaaacatgttaaagatgttggcttaccctcaatacatacgccaactaaaactaaattgcagccaagtgtcttctatgacatttttccaggcagtaaggaaccagcagtcctcacagaaaaagatcctagattgaaagtggactttgactcagctcttttttcaaaatacaaaggtaacacagagtgcagtttgaatgaacatatacaagttgcagtagcacactactcagctcagctagcaacactagatatagatccacaaccaattgcaatggaagatagtgtttttggaatggatggcttggaagctttggatctgaatactagtgcaggttatccctatgtaacactaggaattaaaaagaaagatcttattaataacaagactaaagatatttccaaacttaagctagcattagacaaatatggtgttgatttgcccatgattactttcttaaaagatgaacttagaaagaaggataagatagcagcaggcaaaaccagagttatagaagctagtagtataaatgataccattttgtttagaacagtttatggaaacctattttctaaatttcacttgaacccaggagtggtaacaggctgtgcagttggatgtgatccagaaaccttttggtctaaaattcccttgatgttagatggagattgcattatggcttttgattatacaaattatgatggtagcattcatccaatttggtttaaagctctcggaatggtacttgataatttatcctttaaccctactctaatcaatagactttgtaaatcaaaacatattttcaagtccacatattatgaagttgaaggtggtgtgccctctggttgttctggaactagtatatttaactcaatgattaataatataatcattagaaccttagttttggatgcatataaacatattgatttagataaacttaaaataattgcctatggtgatgatgtgatcttttcttacaagtataaactagacatggaagccatagccaaggaagggcagaaatatggacttactataacacctgcagataaatctagtgaattcaaagaacttgattatggaaatgtaacttttcttaaaagaggatttagacaagatgataaatacaaatttttgatacatcctacttttccagttgaagagatttatgagtccattagatggacaaagaaaccatctcaaatgcaggagcatgtcttatccttgtgtcacttaatgtggcacaatggtcctgagatttataaggactttgaaacaaagatacgcagtgtcagcgctggacgtgcactgtatatccctccttatgaactcctaagacatgaatggtatgaaaaattctagatatagaattaataaatgaatagtttgttagttttataaaaaaaaaaaaaaaaaaaaaaaaaaaaaaaaaaaaaaaaaaaaaaaaaaaa

SEQ ID NO: 62 - DNA, 6959 bp, Artificial Sequence
  Synthetic sequence
ttaaaactggatctgggttgttcccacccagatcacctacatggtgttgtacactattattacggtaatcttgtacgccagttttatactccctttcccaaatgtaacttagaagcaaagcaaactgatcaataggggacaatcatccagattgtcaaagatcaagcacttctgtttccccggtcaaagttgatatgctccacaagggcaaaaacaactgagatcgttatccgcaagatgcctacgcaaagcctagtaatacattgaaagatacttggttggtcgctcagctgttaacccaacagtagacctggtagatgaggctagagattcccctccggcgacggagttctagcctgcgtggctgcctgcacacccactgggtgtgaagccaagtattggacaaggtgtgaagagccgcgtgtgctcatcttgagtcctccggcccctgaatgtggctaaccttaaacctgcagccagtgcacacaatccagtgtgtagctggtcgtaatgagcaattgcgggatgggaccaactactttgggtgtccgtgtttcacttttttccttttattattgcttatggtgacaatatatatagcatatatatattgttatcatgggcgctcaagtatctagacagaatgttggtacgcactcaacacaaaatatggtgtcaaatggatccagcctcaattattttaacatcaattatttcaaagatgcagcttccagtggtgcttctcgattggacttctctcaagaccccagtaaattcacagacccagttaaggatgtgttggagaaaggcatacccactctgcaatctccaagtgtagaagcttgtggatactctgatagaataatccaaattacaagaggcgactcaaccataacatctcaagatgttgctaatgcagtggttgggtatggggtatggccacactacctaactccgcaggatgcaacggctatagacaagccaacacaaccagatacatcatcaaataggttttacacactggatagtaaaatgtggaacagtacctccaaaggttggtggtggaaactaccagatgctcttaaagacatgggtatttttggtgaaaatatgttttatcatttcttgggtagaagtggttatacagtgcacgtacagtgcaatgcaagtaaattccaccagggtacactactagtggttatgataccagaacaccagttagctacagtaaataaaggtaatgttaatgcaggttacaaatacacacatcctggtgaagctggtagagaagtgggtacacaagttgaaaatgagaaacaacctagtgatgataattggctaaattttgatggtacattattgggcaatttactgatattcccacaccagtttattaacttaaggagcaataactcagcaactcttatagtaccatatgttaatgctgttccaatggattctatggttagacataacaattggagtttggtaataataccagtttgtcaactacaaagcaacaatatatccaacattgttcccatcactgtttccattagcccaatgtgtgctgaattctctggagcacgtgccaaaacagttgtgcaaggtctaccagtatatgttacaccaggatcaggacaattcatgacaacagatgatatgcaatctccatgtgcactgccttggtaccatccaacaaaagagatctttataccaggagaggttaagaacttgattgaaatgtgtcaggtggatacactcataccaataaatagcacacagtctaacattggcaatgtcagcatgtacacagtaactctatcaccacaaacaaaattagctgaagaaatttttgcaattaaagtaggtttacaatctacagtgtcattggttgtaccatggatcagtgccagtcagtatagattcactacaccagacacatactcctcagcaggctacattacatgctggtatcaaactaattttgttgttccaccaaacacacctaacactgctgagatgttgtgttttgtatctggatgcaaggacttttgccttcggatggcaagagacacagacctgcacaagcaaacaggaccaataacacaaaatccagtggaaagatatgtagatgaagtcttaaatgaagtgttagtagtgcccaatattaatgagagccaccctaccacatcaaatgcggccccagttttggatgctgctgaaacaggacataccaataagatacagccagaagacactatagaaaccagatatgtgcaatcttcacagacattggatgaaatgagtgtggaaagcttcctaggcagatcggggtgcatccatgaatcagtgttggatattgtggacaattacaatgatcaaagtttcactaaatggaagataaacctgcaagaaatggcacaaattagaagaaaatttgaaatgtttacttatgcaagatttgactctgaaattactatggtaccaagtgtagcagccaaagatggtcacattggtcatatagtcatgcaatatatgtatgtaccaccaggagcacctataccaacaactagaaatgactatgcttggcaatctggaacaaatgcatctgtattttggcagcatgggcaacctttccctcgcttttcacttccctttttgagtattgcatcagcatattacatgttttatgatggttatgatggagacacatataaatccagatatggaactgtagtcaccaatgacatgggaactttgtgttcgcgtattgtgaccagtgagcaattacacaaagtcaaagtggtaacaaggatatatcacaaagccaaacacaccaaagcttggtgcccaagaccacccagagctgttcaatactcacatacacataccaccaactacaaattgagttcagaagtacacaatgatgtggctataagacctagaacaaatctaacaactgttgggcctagtgacatgtatgtgcatgttggtaatctaatatacagaaatctacatttatttaactctgacatacatgattccattttagtgtcttattcatcagatttaatcatataccgaacaagcacacaaggtgatgattatattccaacatgtaattgcactgaagctacatattactgcaaacacaaaaacaggtactacccaattaatgtcacacctcatgactggtatgagatacaagagagtgaatattatccaaaacatatccagtacaatttactaataggtgaaggaccatgtgaaccaggtgattgtggtgggaaattattatgcaaacatggagtgataggtattattacagcaggtggtgagggccatgttgcattcatagatcttagacactttcactgtgctgaagaacaaggaatcactgattacatacacatgctcggcgaagcttttggcagtggatttgtagatagtgttaaagaccagattaattcaataaatcccatcaataacattagcagtaagatggttaaatggatgttaagaattatatcagctatggttataattattagaaactcttcagatccgcaaacaataattgccactttaacactgattggatgcaatggttctccttggagatttctcaaagaaaagttctgtaaatggactcaattaacttatatacacaaagaatcagattcatggctcaaaaaattcactgagatgtgtaatgcagctagggggctagaatggattggaaacaaaatatccaaatttatcgattggatgaaatcaatgctaccccaggcacaattaaaagttaagtatttgagtgaacttaagaaactcaactttctggagaaacaggttgaaaatctcagagcagctgatactaacactcaagaaaaaatcaagtgtgagatagatacattgcatgacttatcctgtaagtttttacctctgtatgccagtgaagcaaagagaattaaagtgttgtatcacaagtgcactaacataattaaacagaagaagagaagtgaacctgtagcagttatgatacacgggcctcctgggaccggaaaatcaatcactacaagcttcctggctagaatgattactaatgagagtgacatatactcacttccaccagaccctaaatattttgatggttatgataaccagagtgtagtaataatggatgacatcatgcaaaaccctggtggtgaggacatgacattattctgtcagatggtatctagtgtgacttttatacccccaatggctgatctaccagataagggaaaaccctttgattctagatttgtattgtgtagtactaatcactcactcttggcacccccaactatatcgtcgctcccagcaatgaatagaagattctatttagatttagatattcttgtgcatgataactacaaagataatcagggtaagttagatgtttctagagcatttcgactatgtgatgttgattcaaagattggaaatgcaaaatgttgtccatttgtatgtggcaaggcagtgacattcaaggaccgcaacacatgtagaacttattcactttcccaaatatacaaccaaattcttgaggaagacaagagaaggagacaggtggttgatgtcatgtctgcaattttccaagggcctatatccatgggtaaacccccaccaccagctataacagaccttttacactcagtaaggacaccagaagtaattaagtactgccaagacaataaatggatagttcctgcggactgccaaattgaaagggatctgaatatagctaatagcataatcacaatcatagctaatatcatcagtatagcagggattatatatataatttataagctcttttgctctctacagggcccttactcgggggagcccaaacctaagacaaaagttcccgagagaagagtggtagctcaaggtccagaagaagaatttggaatgtctattattaaaaataatacctgtgttgtgaccacaacaaatggaaaatttacaggattaggcatttatgacagaatcttaatattaccaacacatgctgacccgggcagtgaaattcaagtaaatggaatacacaccaaagtgcttgattcttatgacttgtttaataaggaaggtgtcaagttggaaattactgtgctaaagttagatagaaatgagaagttcagggatatacgtaagtacatacctgaatcagaagatgactatcctgaatgcaacctagcactagtggccaatcaaacagaaccaactataatcaaagtaggggatgttgtgtcttatggtaatatattacttagtggcacacagacagccagaatgcttaaatataactatcctacaaaatctgggtattgtggtggtgtgttatacaagattggccagatcttaggtatacatgtgggtggcaatggtagagatgggttttcatctatgctattgagatcatacttcactgaacaacaaggccaaattcaaatctctaaacatgttaaagatgttggcttaccctcaatacatacgccaactaaaactaaattgcagccaagtgtcttctatgacatttttccaggcagtaaggaaccagcagtcctcacagaaaaagatcctagattgaaagtggactttgactcagctcttttttcaaaatacaaaggtaacacagagtgcagtttgaatgaacatatacaagttgcagtagcacactactcagctcagctagcaacactagatatagatccacaaccaattgcaatggaagatagtgtttttggaatggatggcttggaagctttggatctgaatactagtgcaggttatccctatgtaacactaggaattaaaaagaaagatcttattaataacaagactaaagatatttccaaacttaagctagcattagacaaatatggtgttgatttgcccatgattactttcttaaaagatgaacttagaaagaaggataagatagcagcaggcaaaaccagagttatagaagctagtagtataaatgataccattttgtttagaacagtttatggaaacctattttctaaatttcacttgaacccaggagtggtaacaggctgtgcagttggatgtgatccagaaaccttttggtctaaaattcccttgatgttagatggagattgcattatggcttttgattatacaaattatgatggtagcattcatccaatttggtttaaagctctcggaatggtacttgataatttatcctttaaccctactctaatcaatagactttgtaaatcaaaacatattttcaagtccacatattatgaagttgaaggtggtgtgccctctggttgttctggaactagtatatttaactcaatgattaataatataatcattagaaccttagttttggatgcatataaacatattgatttagataaacttaaaataattgcctatggtgatgatgtgatcttttcttacaagtataaactagacatggaagccatagccaaggaagggcagaaatatggacttactataacacctgcagataaatctagtgaattcaaagaacttgattatggaaatgtaacttttcttaaaagaggatttagacaagatgataaatacaaatttttgatacatcctacttttccagttgaagagatttatgagtccattagatggacaaagaaaccatctcaaatgcaggagcatgtcttatccttgtgtcacttaatgtggcacaatggtcctgagatttataaggactttgaaacaaagatacgcagtgtcagcgctggacgtgcactgtatatccctccttatgaactcctaagacatgaatggtatgaaaaattctagatatagaattaataaatgaatagtttgttagttttataaaaaaaaaaaaaaaaaaaaaaaaaaaaaaaaaaaaaaaaaaaaaaaaaaaa

SEQ ID NO: 63 - DNA, 6958 bp, Artificial Sequence
  Synthetic sequence
ttaaaactggatctgggttgttcccacccagatcacctacatggtgttgtacactattattacggtaatcttgtacgccagttttatactccctttcccaaatgtaacttagaagcaaagcaaactgatcaataggggacaatcatccagattgtcaaagatcaagcacttctgtttccccggtcaaagttgatatgctccacaagggcaaaaacaactgagatcgttatccgcaagatgcctacgcaaagcctagtaatacattgaaagatacttggttggtcgctcagctgttaacccaacagtagacctggtagatgaggctagagattcccctccggcgacggagttctagcctgcgtggctgcctgcacacccactgggtgtgaagccaagtattggacaaggtgtgaagagccgcgtgtgctcatcttgagtcctccggcccctgaatgtggctaaccttaaacctgcagccagtgcacacaatccagtgtgtagctggtcgtaatgagcaattgcgggatgggaccaactactttgggtgtccgtgtttcacttttttccttttattattgcttatggtgacaatatatatagcatatatatattgttatcatgggcgctcaagtatctagacagaatgttggtacgcactcaacacaaaatatggtgtcaaatggatccagcctcaattattttaacatcaattatttcaaagatgcagcttccagtggtgcttctcgattggacttctctcaagaccccagtaaattcacagacccagttaaggatgtgttggagaaaggcatacccactctgcaatctccaagtgtagaagcttgtggatactctgatagaataatccaaattacaagaggcgactcaaccataacatctcaagatgttgctaatgcagtggttgggtatggggtatggccacactacctaactccgcaggatgcaacggctatagacaagccaacacaaccagatacatcatcaaataggttttacacactggatagtaaaatgtggaacagtacctccaaaggttggtggtggaaactaccagatgctcttaaagacatgggtatttttggtgaaaatatgttttatcatttcttgggtagaagtggttatacagtgcacgtacagtgcaatgcaagtaaattccaccagggtacactactagtggttatgataccagaacaccagttagctacagtaaataaaggtaatgttaatgcaggttacaaatacacacatcctggtgaagctggtagagaagtgggtacacaagttgaaaatgagaaacaacctagtgatgataattggctaaattttgatggtacattattgggcaatttactgatattcccacaccagtttattaacttaaggagcaataactcagcaactcttatagtaccatatgttaatgctgttccaatggattctatggttagacataacaattggagtttggtaataataccagtttgtcaactacaaagcaacaatatatccaacattgttcccatcactgtttccattagcccaatgtgtgctgaattctctggagcacgtgccaaaacagttgtgcaaggtctaccagtatatgttacaccaggatcaggacaattcatgacaacagatgatatgcaatctccatgtgcactgccttggtaccatccaacaaaagagatctttataccaggagaggttaagaacttgattgaaatgtgtcaggtggatacactcataccaataaatagcacacagtctaacattggcaatgtcagcatgtacacagtaactctatcaccacaaacaaaattagctgaagaaatttttgcaattaaataggtttacaatctacagtgtcattggttgtaccatggatcagtgccagtcagtatagattcactacaccagacacatactcctcagcaggctacattacatgctggtatcaaactaattttgttgttccaccaaacacacctaacactgctgagatgttgtgttttgtatctggatgcaaggacttttgccttcggatggcaagagacacagacctgcacaagcaaacaggaccaataacacaaaatccagtggaaagatatgtagatgaagtcttaaatgaagtgttagtagtgcccaatattaatgagagccaccctaccacatcaaatgcggccccagttttggatgctgctgaaacaggacataccaataagatacagccagaagacactatagaaaccagatatgtgcaatcttcacagacattggatgaaatgagtgtggaaagcttcctaggcagatcggggtgcatccatgaatcagtgttggatattgtggacaattacaatgatcaaagtttcactaaatggaagataaacctgcaagaaatggcacaaattagaagaaaatttgaaatgtttacttatgcaagatttgactctgaaattactatggtaccaagtgtagcagccaaagatggtcacattggtcatatagtcatgcaatatatgtatgtaccaccaggagcacctataccaacaactagaaatgactatgcttggcaatctggaacaaatgcatctgtattttggcagcatgggcaacctttccctcgcttttcacttccctttttgagtattgcatcagcatattacatgttttatgatggttatgatggagacacatataaatccagatatggaactgtagtcaccaatgacatgggaactttgtgttcgcgtattgtgaccagtgagcaattacacaaagtcaaagtggtaacaaggatatatcacaaagccaaacacaccaaagcttggtgcccaagaccacccagagctgttcaatactcacatacacataccaccaactacaaattgagttcagaagtacacaatgatgtggctataagacctagaacaaatctaacaactgttgggcctagtgacatgtatgtgcatgttggtaatctaatatacagaaatctacatttatttaactctgacatacatgattccattttagtgtcttattcatcagatttaatcatataccgaacaagcacacaaggtgatgattatattccaacatgtaattgcactgaagctacatattactgcaaacacaaaaacaggtactacccaattaatgtcacacctcatgactggtatgagatacaagagagtgaatattatccaaaacatatccagtacaatttactaataggtgaaggaccatgtgaaccaggtgattgtggtgggaaattattatgcaaacatggagtgataggtattattacagcaggtggtgagggccatgttgcattcatagatcttagacactttcactgtgctgaagaacaaggaatcactgattacatacacatgctcggcgaagcttttggcagtggatttgtagatagtgttaaagaccagattaattcaataaatcccatcaataacattagcagtaagatggttaaatggatgttaagaattatatcagctatggttataattattagaaactcttcagatccgcaaacaataattgccactttaacactgattggatgcaatggttctccttggagatttctcaaagaaaagttctgtaaatggactcaattaacttatatacacaaagaatcagattcatggctcaaaaaattcactgagatgtgtaatgcagctagggggctagaatggattggaaacaaaatatccaaatttatcgattggatgaaatcaatgctaccccaggcacaattaaaagttaagtatttgagtgaacttaagaaactcaactttctggagaaacaggttgaaaatctcagagcagctgatactaacactcaagaaaaaatcaagtgtgagatagatacattgcatgacttatcctgtaagtttttacctctgtatgccagtgaagcaaagagaattaaagtgttgtatcacaagtgcactaacataattaaacagaagaagagaagtgaacctgtagcagttatgatacacgggcctcctgggaccggaaaatcaatcactacaagcttcctggctagaatgattactaatgagagtgacatatactcacttccaccagaccctaaatattttgatggttatgataaccagagtgtagtaataatggatgacatcatgcaaaaccctggtggtgaggacatgacattattctgtcagatggtatctagtgtgacttttatacccccaatggctgatctaccagataagggaaaaccctttgattctagatttgtattgtgtagtactaatcactcactcttggcacccccaactatatcgtcgctcccagcaatgaatagaagattctatttagatttagatattcttgtgcatgataactacaaagataatcagggtaagttagatgtttctagagcatttcgactatgtgatgttgattcaaagattggaaatgcaaaatgttgtccatttgtatgtggcaaggcagtgacattcaaggaccgcaacacatgtagaacttattcactttcccaaatatacaaccaaattcttgaggaagacaagagaaggagacaggtggttgatgtcatgtctgcaattttccaagggcctatatccatgggtaaacccccaccaccagctataacagaccttttacactcagtaaggacaccagaagtaattaagtactgccaagacaataaatggatagttcctgcggactgccaaattgaaagggatctgaatatagctaatagcataatcacaatcatagctaatatcatcagtatagcagggattatatatataatttataagctcttttgctctctacagggcccttactcgggggagcccaaacctaagacaaaagttcccgagagaagagtggtagctcaaggtccagaagaagaatttggaatgtctattattaaaaataatacctgtgttgtgaccacaacaaatggaaaatttacaggattaggcatttatgacagaatcttaatattaccaacacatgctgacccgggcagtgaaattcaagtaaatggaatacacaccaaagtgcttgattcttatgacttgtttaataaggaaggtgtcaagttggaaattactgtgctaaagttagatagaaatgagaagttcagggatatacgtaagtacatacctgaatcagaagatgactatcctgaatgcaacctagcactagtggccaatcaaacagaaccaactataatcaaagtaggggatgttgtgtcttatggtaatatattacttagtggcacacagacagccagaatgcttaaatataactatcctacaaaatctgggtattgtggtggtgtgttatacaagattggccagatcttaggtatacatgtgggtggcaatggtagagatgggttttcatctatgctattgagatcatacttcactgaacaacaaggccaaattcaaatctctaaacatgttaaagatgttggcttaccctcaatacatacgccaactaaaactaaattgcagccaagtgtcttctatgacatttttccaggcagtaaggaaccagcagtcctcacagaaaaagatcctagattgaaagtggactttgactcagctcttttttcaaaatacaaaggtaacacagagtgcagtttgaatgaacatatacaagttgcagtagcacactactcagctcagctagcaacactagatatagatccacaaccaattgcaatggaagatagtgtttttggaatggatggcttggaagctttggatctgaatactagtgcaggttatccctatgtaacactaggaattaaaaagaaagatcttattaataacaagactaaagatatttccaaacttaagctagcattagacaaatatggtgttgatttgcccatgattactttcttaaaagatgaacttagaaagaaggataagatagcagcaggcaaaaccagagttatagaagctagtagtataaatgataccattttgtttagaacagtttatggaaacctattttctaaatttcacttgaacccaggagtggtaacaggctgtgcagttggatgtgatccagaaaccttttggtctaaaattcccttgatgttagatggagattgcattatggcttttgattatacaaattatgatggtagcattcatccaatttggtttaaagctctcggaatggtacttgataatttatcctttaaccctactctaatcaatagactttgtaaatcaaaacatattttcaagtccacatattatgaagttgaaggtggtgtgccctctggttgttctggaactagtatatttaactcaatgattaataatataatcattagaaccttagttttggatgcatataaacatattgatttagataaacttaaaataattgcctatggtgatgatgtgatcttttcttacaagtataaactagacatggaagccatagccaaggaagggcagaaatatggacttactataacacctgcagataaatctagtgaattcaaagaacttgattatggaaatgtaacttttcttaaaagaggatttagacaagatgataaatacaaatttttgatacatcctacttttccagttgaagagatttatgagtccattagatggacaaagaaaccatctcaaatgcaggagcatgtcttatccttgtgtcacttaatgtggcacaatggtcctgagatttataaggactttgaaacaaagatacgcagtgtcagcgctggacgtgcactgtatatccctccttatgaactcctaagacatgaatggtatgaaaaattctagatatagaattaataaatgaatagtttgttagttttataaaaaaaaaaaaaaaaaaaaaaaaaaaaaaaaaaaaaaaaaaaaaaaaaaaa

SEQ ID NO: 64 - DNA, 7124 bp, Artificial Sequence
  Synthetic sequence
ttaaaactggatctgggttgttcccacccagatcacctacatggtgttgtacactattattacggtaatcttgtacgccagttttatactccctttcccaaatgtaacttagaagcaaagcaaactgatcaataggggacaatcatccagattgtcaaagatcaagcacttctgtttccccggtcaaagttgatatgctccacaagggcaaaaacaactgagatcgttatccgcaagatgcctacgcaaagcctagtaatacattgaaagatacttggttggtcgctcagctgttaacccaacagtagacctggtagatgaggctagagattcccctccggcgacggagttctagcctgcgtggctgcctgcacacccactgggtgtgaagccaagtattggacaaggtgtgaagagccgcgtgtgctcatcttgagtcctccggcccctgaatgtggctaaccttaaacctgcagccagtgcacacaatccagtgtgtagctggtcgtaatgagcaattgcgggatgggaccaactactttgggtgtccgtgtttcacttttttccttttattattgcttatggtgacaatatatatagcatatatatattgttatcatgggcgctcaagtatctagacagaatgttggtacgcactcaacacaaaatatggtgtcaaatggatccagcctcaattattttaacatcaattatttcaaagatgcagcttccagtggtgcttctcgattggacttctctcaagaccccagtaaattcacagacccagttaaggatgtgttggagaaaggcatacccactctgcaatctccaagtgtagaagcttgtggatactctgatagaataatccaaattacaagaggcgactcaaccataacatctcaagatgttgctaatgcagtggttgggtatggggtatggccacactacctaactccgcaggatgcaacggctatagacaagccaacacaaccagatacatcatcaaataggttttacacactggatagtaaaatgtggaacagtacctccaaaggttggtggtggaaactaccagatgctcttaaagacatgggtatttttggtgaaaatatgttttatcatttcttgggtagaagtggttatacagtgcacgtacagtgcaatgcaagtaaattccaccagggtacactactagtggttatgataccagaacaccagttagctacagtaaataaaggtaatgttaatgcaggttacaaatacacacatcctggtgaagctggtagagaagtgggtacacaagttgaaaatgagaaacaacctagtgatgataattggctaaattttgatggtacattattgggcaatttactgatattcccacaccagtttattaacttaaggagcaataactcagcaactcttatagtaccatatgttaatgctgttccaatggattctatggttagacataacaattggagtttggtaataataccagtttgtcaactacaaagcaacaatatatccaacattgttcccatcactgtttccattagcccaatgtgtgctgaattctctggagcacgtgccaaaacagttgtgcaaggtctaccagtatatgttacaccaggatcaggacaattcatgacaacagatgatatgcaatctccatgtgcactgccttggtaccatccaacaaaagagatctttataccaggagaggttaagaacttgattgaaatgtgtcaggtggatacactcataccaataaatagcacacagtctaacattggcaatgtcagcatgtacacagtaactctatcaccacaaacaaaattagctgaagaaatttttgcaattaaagtagatattgcctcacatcccttagccacaaccctcattggtgagatagcaagttactttacacactggacagggagcctgcgattcagtttcatgttttgcgggactgcaaacactaccttaaaagttttgctagcatatacacccccagggattggtaagcctagaagtagaaaggaagcaatgttagggacacacgtggtgtgggatgtaggtttacaatctacagtgtcattggttgtaccatggatcagtgccagtcagtatagattcactacaccagacacatactcctcagcaggctacattacatgctggtatcaaactaattttgttgttccaccaaacacacctaacactgctgagatgttgtgttttgtatctggatgcaaggacttttgccttcggatggcaagagacacagacctgcacaagcaaacaggaccaataacacaaaatccagtggaaagatatgtagatgaagtcttaaatgaagtgttagtagtgcccaatattaatgagagccaccctaccacatcaaatgcggccccagttttggatgctgctgaaacaggacataccaataagatacagccagaagacactatagaaaccagatatgtgcaatcttcacagacattggatgaaatgagtgtggaaagcttcctaggcagatcggggtgcatccatgaatcagtgttggatattgtggacaattacaatgatcaaagtttcactaaatggaagataaacctgcaagaaatggcacaaattagaagaaaatttgaaatgtttacttatgcaagatttgactctgaaattactatggtaccaagtgtagcagccaaagatggtcacattggtcatatagtcatgcaatatatgtatgtaccaccaggagcacctataccaacaactagaaatgactatgcttggcaatctggaacaaatgcatctgtattttggcagcatgggcaacctttccctcgcttttcacttccctttttgagtattgcatcagcatattacatgttttatgatggttatgatggagacacatataaatccagatatggaactgtagtcaccaatgacatgggaactttgtgttcgcgtattgtgaccagtgagcaattacacaaagtcaaagtggtaacaaggatatatcacaaagccaaacacaccaaagcttggtgcccaagaccacccagagctgttcaatactcacatacacataccaccaactacaaattgagttcagaagtacacaatgatgtggctataagacctagaacaaatctaatatacagaaatctacatttatttaactctgacatacatgattccattttagtgtcttattcatcagatttaatcatataccgaacaagcacacaaggtgatgattatattccaacatgtaattgcactgaagctacatattactgcaaacacaaaaacaggtactacccaattaatgtcacacctcatgactggtatgagatacaagagagtgaatattatccaaaacatatccagtacaatttactaataggtgaaggaccatgtgaaccaggtgattgtggtgggaaattattatgcaaacatggagtgataggtattattacagcaggtggtgagggccatgttgcattcatagatcttagacactttcactgtgctgaagaacaaggaatcactgattacatacacatgctcggcgaagcttttggcagtggatttgtagatagtgttaaagaccagattaattcaataaatcccatcaataacattagcagtaagatggttaaatggatgttaagaattatatcagctatggttataattattagaaactcttcagatccgcaaacaataattgccactttaacactgattggatgcaatggttctccttggagatttctcaaagaaaagttctgtaaatggactcaattaacttatatacacaaagaatcagattcatggctcaaaaaattcactgagatgtgtaatgcagctagggggctagaatggattggaaacaaaatatccaaatttatcgattggatgaaatcaatgctaccccaggcacaattaaaagttaagtatttgagtgaacttaagaaactcaactttctggagaaacaggttgaaaatctcagagcagctgatactaacactcaagaaaaaatcaagtgtgagatagatacattgcatgacttatcctgtaagtttttacctctgtatgccagtgaagcaaagagaattaaagtgttgtatcacaagtgcactaacataattaaacagaagaagagaagtgaacctgtagcagttatgatacacgggcctcctgggaccggaaaatcaatcactacaagcttcctggctagaatgattactaatgagagtgacatatactcacttccaccagaccctaaatattttgatggttatgataaccagagtgtagtaataatggatgacatcatgcaaaaccctggtggtgaggacatgacattattctgtcagatggtatctagtgtgacttttatacccccaatggctgatctaccagataagggaaaaccctttgattctagatttgtattgtgtagtactaatcactcactcttggcacccccaactatatcgtcgctcccagcaatgaatagaagattctatttagatttagatattcttgtgcatgataactacaaagataatcagggtaagttagatgtttctagagcatttcgactatgtgatgttgattcaaagattggaaatgcaaaatgttgtccatttgtatgtggcaaggcagtgacattcaaggaccgcaacacatgtagaacttattcactttcccaaatatacaaccaaattcttgaggaagacaagagaaggagacaggtggttgatgtcatgtctgcaattttccaagggcctatatccatgggtaaacccccaccaccagctataacagaccttttacactcagtaaggacaccagaagtaattaagtactgccaagacaataaatggatagttcctgcggactgccaaattgaaagggatctgaatatagctaatagcataatcacaatcatagctaatatcatcagtatagcagggattatatatataatttataagctcttttgctctctacagggcccttactcgggggagcccaaacctaagacaaaagttcccgagagaagagtggtagctcaaggtccagaagaagaatttggaatgtctattattaaaaataatacctgtgttgtgaccacaacaaatggaaaatttacaggattaggcatttatgacagaatcttaatattaccaacacatgctgacccgggcagtgaaattcaagtaaatggaatacacaccaaagtgcttgattcttatgacttgtttaataaggaaggtgtcaagttggaaattactgtgctaaagttagatagaaatgagaagttcagggatatacgtaagtacatacctgaatcagaagatgactatcctgaatgcaacctagcactagtggccaatcaaacagaaccaactataatcaaagtaggggatgttgtgtcttatggtaatatattacttagtggcacacagacagccagaatgcttaaatataactatcctacaaaatctgggtattgtggtggtgtgttatacaagattggccagatcttaggtatacatgtgggtggcaatggtagagatgggttttcatctatgctattgagatcatacttcactgaacaacaaggccaaattcaaatctctaaacatgttaaagatgttggcttaccctcaatacatacgccaactaaaactaaattgcagccaagtgtcttctatgacatttttccaggcagtaaggaaccagcagtcctcacagaaaaagatcctagattgaaagtggactttgactcagctcttttttcaaaatacaaaggtaacacagagtgcagtttgaatgaacatatacaagttgcagtagcacactactcagctcagctagcaacactagatatagatccacaaccaattgcaatggaagatagtgtttttggaatggatggcttggaagctttggatctgaatactagtgcaggttatccctatgtaacactaggaattaaaaagaaagatcttattaataacaagactaaagatatttccaaacttaagctagcattagacaaatatggtgttgatttgcccatgattactttcttaaaagatgaacttagaaagaaggataagatagcagcaggcaaaaccagagttatagaagctagtagtataaatgataccattttgtttagaacagtttatggaaacctattttctaaatttcacttgaacccaggagtggtaacaggctgtgcagttggatgtgatccagaaaccttttggtctaaaattcccttgatgttagatggagattgcattatggcttttgattatacaaattatgatggtagcattcatccaatttggtttaaagctctcggaatggtacttgataatttatcctttaaccctactctaatcaatagactttgtaaatcaaaacatattttcaagtccacatattatgaagttgaaggtggtgtgccctctggttgttctggaactagtatatttaactcaatgattaataatataatcattagaaccttagttttggatgcatataaacatattgatttagataaacttaaaataattgcctatggtgatgatgtgatcttttcttacaagtataaactagacatggaagccatagccaaggaagggcagaaatatggacttactataacacctgcagataaatctagtgaattcaaagaacttgattatggaaatgtaacttttcttaaaagaggatttagacaagatgataaatacaaatttttgatacatcctacttttccagttgaagagatttatgagtccattagatggacaaagaaaccatctcaaatgcaggagcatgtcttatccttgtgtcacttaatgtggcacaatggtcctgagatttataaggactttgaaacaaagatacgcagtgtcagcgctggacgtgcactgtatatccctccttatgaactcctaagacatgaatggtatgaaaaattctagatatagaattaataaatgaatagtttgttagttttataaaaaaaaaaaaaaaaaaaaaaaaaaaaaaaaaaaaaaaaaaaaaaaaaaaa

SEQ ID NO: 65 - DNA, 5978 bp, Artificial Sequence
  Synthetic sequence
ttaaaactggatctgggttgttcccacccagatcacctacatggtgttgtacactattattacggtaatcttgtacgccagttttatactccctttcccaaatgtaacttagaagcaaagcaaactgatcaataggggacaatcatccagattgtcaaagatcaagcacttctgtttccccggtcaaagttgatatgctccacaagggcaaaaacaactgagatcgttatccgcaagatgcctacgcaaagcctagtaatacattgaaagatacttggttggtcgctcagctgttaacccaacagtagacctggtagatgaggctagagattcccctccggcgacggagttctagcctgcgtggctgcctgcacacccactgggtgtgaagccaagtattggacaaggtgtgaagagccgcgtgtgctcatcttgagtcctccggcccctgaatgtggctaaccttaaacctgcagccagtgcacacaatccagtgtgtagctggtcgtaatgagcaattgcgggatgggaccaactactttgggtgtccgtgtttcacttttttccttttattattgcttatggtgacaatatatatagcatatatatattgttatcatgggcgctcaagtatctagacagaatgttggtacgcactcaacacaaaatatggtgtcaaatggatccagcctcaattattttaacatcaattatttcaaagatgcagcttccagtggtgcttctcgattggacttctctcaagaccccagtaaattcacagacccagttaaggatgtgttggagaaaggcatacccactctgcaatctccaagtgtagaagcttgtggatactctgatagaataatccaaattacaagaggcgactcaaccataacatctcaagatgttgctaatgcagtggttgggtatggggtatggccacactacctaactccgcaggatgcaacggctatagacaagccaacacaaccagatacatcatcaaataggttttacacactggatagtaaaatgtggaacagtacctccaaaggttggtggtggaaactaccagatgctcttaaagacatgggtatttttggtgaaaatatgttttatcatttcttgggtagaagtggttatacagtgcacgtacagtgcaatgcaagtaaattccaccagggtacactactagtggttatgataccagaacaccagttagctacagtaaataaaggtaatgttaatgcaggttacaaatacacacatcctggtgaagctggtagagaagtgggtacacaagttgaaaatgagaaacaacctagtgatgataattggctaaattttgatggtacattattgggcaatttactgatattcccacaccagtttattaacttaaggagcaataactcagcaactcttatagtaccatatgttaatgctgttccaatggattctatggttagacataacaattggagtttggtaataataccagtttgtcaactacaaagcaacaatatatccaacattgttcccatcactgtttccattagcccaatgtgtgctgaattctctggagcacgtgccaaaacagttgtgcaaggtctaccagtatatgttacaccaggatcaggacaattcatgacaacagatgatatgcaatctccatgtgcactgccttggtaccatccaacaaaagagatctttataccaggagaggttaagaacttgattgaaatgtgtcaggtggatacactcataccaataaatagcacacagtctaacattggcaatgtcagcatgtacacagtaactctatcaccacaaacaaaattagctgaagaaatttttgcaattaaagtagatattgcctcacatcccttagccacaaccctcattggtgagatagcaagttactttacacactggacagggagcctgcgattcagtttcatgttttgcgggactgcaaacactaccttaaaagttttgctagcatatacacccccagggattggtaagcctagaagtagaaaggaagcaatgttagggacacacgtggtgtgggatgtaggtttacaatctacagtgtcattggttgtaccatggatcagtgccagtcagtatagattcactacaccagacacatactcctcagcaggctacattacatgctggtatcaaactaattttgttgttccaccaaacacacctaacactgctgagatgttgtgttttgtatctggatgcaaggacttttgccttcggatggcaagagacacagacctgcacaagcaaacaggaccaataacacaaaatccagtggaaagatatgtagatgaagtcttaaatgaagtgttagtagtgcccaatattaatgagagccaccctaccacatcaaatgcggccccagttttggatgctgctgaaacaggacataccaataagatacagccagaagacactatagaaaccagatatgtgcaatcttcacagacattggatgaaatgagtgtggaaagcttcctaggcagatcggggtgcatccatgaatcagtgttggatattgtggacaattacaatgatcaaagtttcactaaatggaagataaacctgcaagaaatggcacaaattagaagaaaatttgaaatgtttacttatgcaagatttgactctgaaattactatggtaccaagtgtagcagccaaagatggtcacattggtcatatagtcatgcaatatatgtatgtaccaccaggagcacctataccaacaactagaaatgactatgcttggcaatctggaacaaatgcatctgtattttggcagcatgggcaacctttccctcgcttttcacttccctttttgagtattgcatcagcatattacatgttttatgatggttatgataagtgtgagatagatacattgcatgacttatcctgtaagtttttacctctgtatgccagtgaagcaaagagaattaaagtgttgtatcacaagtgcactaacataattaaacagaagaagagaagtgaacctgtagcagttatgatacacgggcctcctgggaccggaaaatcaatcactacaagcttcctggctagaatgattactaatgagagtgacatatactcacttccaccagaccctaaatattttgatggttatgataaccagagtgtagtaataatggatgacatcatgcaaaaccctggtggtgaggacatgacattattctgtcagatggtatctagtgtgacttttatacccccaatggctgatctaccagataagggaaaaccctttgattctagatttgtattgtgtagtactaatcactcactcttggcacccccaactatatcgtcgctcccagcaatgaatagaagattctatttagatttagatattcttgtgcatgataactacaaagataatcagggtaagttagatgtttctagagcatttcgactatgtgatgttgattcaaagattggaaatgcaaaatgttgtccatttgtatgtggcaaggcagtgacattcaaggaccgcaacacatgtagaacttattcactttcccaaatatacaaccaaattcttgaggaagacaagagaaggagacaggtggttgatgtcatgtctgcaattttccaagggcctatatccatgggtaaacccccaccaccagctataacagaccttttacactcagtaaggacaccagaagtaattaagtactgccaagacaataaatggatagttcctgcggactgccaaattgaaagggatctgaatatagctaatagcataatcacaatcatagctaatatcatcagtatagcagggattatatatataatttataagctcttttgctctctacagggcccttactcgggggagcccaaacctaagacaaaagttcccgagagaagagtggtagctcaaggtccagaagaagaatttggaatgtctattattaaaaataatacctgtgttgtgaccacaacaaatggaaaatttacaggattaggcatttatgacagaatcttaatattaccaacacatgctgacccgggcagtgaaattcaagtaaatggaatacacaccaaagtgcttgattcttatgacttgtttaataaggaaggtgtcaagttggaaattactgtgctaaagttagatagaaatgagaagttcagggatatacgtaagtacatacctgaatcagaagatgactatcctgaatgcaacctagcactagtggccaatcaaacagaaccaactataatcaaagtaggggatgttgtgtcttatggtaatatattacttagtggcacacagacagccagaatgcttaaatataactatcctacaaaatctgggtattgtggtggtgtgttatacaagattggccagatcttaggtatacatgtgggtggcaatggtagagatgggttttcatctatgctattgagatcatacttcactgaacaacaaggccaaattcaaatctctaaacatgttaaagatgttggcttaccctcaatacatacgccaactaaaactaaattgcagccaagtgtcttctatgacatttttccaggcagtaaggaaccagcagtcctcacagaaaaagatcctagattgaaagtggactttgactcagctcttttttcaaaatacaaaggtaacacagagtgcagtttgaatgaacatatacaagttgcagtagcacactactcagctcagctagcaacactagatatagatccacaaccaattgcaatggaagatagtgtttttggaatggatggcttggaagctttggatctgaatactagtgcaggttatccctatgtaacactaggaattaaaaagaaagatcttattaataacaagactaaagatatttccaaacttaagctagcattagacaaatatggtgttgatttgcccatgattactttcttaaaagatgaacttagaaagaaggataagatagcagcaggcaaaaccagagttatagaagctagtagtataaatgataccattttgtttagaacagtttatggaaacctattttctaaatttcacttgaacccaggagtggtaacaggctgtgcagttggatgtgatccagaaaccttttggtctaaaattcccttgatgttagatggagattgcattatggcttttgattatacaaattatgatggtagcattcatccaatttggtttaaagctctcggaatggtacttgataatttatcctttaaccctactctaatcaatagactttgtaaatcaaaacatattttcaagtccacatattatgaagttgaaggtggtgtgccctctggttgttctggaactagtatatttaactcaatgattaataatataatcattagaaccttagttttggatgcatataaacatattgatttagataaacttaaaataattgcctatggtgatgatgtgatcttttcttacaagtataaactagacatggaagccatagccaaggaagggcagaaatatggacttactataacacctgcagataaatctagtgaattcaaagaacttgattatggaaatgtaacttttcttaaaagaggatttagacaagatgataaatacaaatttttgatacatcctacttttccagttgaagagatttatgagtccattagatggacaaagaaaccatctcaaatgcaggagcatgtcttatccttgtgtcacttaatgtggcacaatggtcctgagatttataaggactttgaaacaaagatacgcagtgtcagcgctggacgtgcactgtatatccctccttatgaactcctaagacatgaatggtatgaaaaattctagatatagaattaataaatgaatagtttgttagttttataaaaaaaaaaaaaaaaaaaaaaaaaaaaaaaaaaaaaaaaaaaaaaaaaaaa

SEQ ID NO: 66 - DNA, 7012 bp, Artificial Sequence
  Synthetic sequence
ttaaaactggatctgggttgttcccacccagatcacctacatggtgttgtacactattattacggtaatcttgtacgccagttttatactccctttcccaaatgtaacttagaagcaaagcaaactgatcaataggggacaatcatccagattgtcaaagatcaagcacttctgtttccccggtcaaagttgatatgctccacaagggcaaaaacaactgagatcgttatccgcaagatgcctacgcaaagcctagtaatacattgaaagatacttggttggtcgctcagctgttaacccaacagtagacctggtagatgaggctagagattcccctccggcgacggagttctagcctgcgtggctgcctgcacacccactgggtgtgaagccaagtattggacaaggtgtgaagagccgcgtgtgctcatcttgagtcctccggcccctgaatgtggctaaccttaaacctgcagccagtgcacacaatccagtgtgtagctggtcgtaatgagcaattgcgggatgggaccaactactttgggtgtccgtgtttcacttttttccttttattattgcttatggtgacaatatatatagcatatatatattgttatcatgggcgctcaagtatctagacagaatgttggtacgcactcaacacaaaatatggtgtcaaatggatccagcctcaattattttaacatcaattatttcaaagatgcagcttccagtggtgcttctcgattggacttctctcaagaccccagtaaattcacagacccagttaaggatgtgttggagaaaggcatacccactctgcaatctccaagtgtagaagcttgtggatactctgatagaataatccaaattacaagaggcgactcaaccataacatctcaagatgttgctaatgcagtggttgggtatggggtatggccacactacctaactccgcaggatgcaacggctatagacaagccaacacaaccagatacatcatcaaataggttttacacactggatagtaaaatgtggaacagtacctccaaaggttggtggtggaaactaccagatgctcttaaagacatgggtatttttggtgaaaatatgttttatcatttcttgggtagaagtggttatacagtgcacgtacagtgcaatgcaagtaaattccaccagggtacactactagtggttatgataccagaacaccagttagctacagtaaataaaggtaatgttaatgcaggttacaaatacacacatcctggtgaagctggtagagaagtgggtacacaagttgaaaatgagaaacaacctagtgatgataattggctaaattttgatggtacattattgggcaatttactgatattcccacaccagtttattaacttaaggagcaataactcagcaactcttatagtaccatatgttaatgctgttccaatggattctatggttagacataacaattggagtttggtaataataccagtttgtcaactacaaagcaacaatatatccaacattgttcccatcactgtttccattagcccaatgtgtgctgaattctctggagcacgtgccaaaacagttgtgcaaggtctaccagtatatgttacaccaggatcaggacaattcatgacaacagatgatatgcaatctccatgtgcactgccttggtaccatccaacaaaagagatctttataccaggagaggttaagaacttgattgaaatgtgtcaggtggatacactcataccaataaatagcacacagtctaacattggcaatgtcagcatgtacacagtaactctatcaccacaaacaaaattagctgaagaaatttttgcaattaaagtagatattgcctcacatcccttagccacaaccctcattggtgagatagcaagttactttacacactggacagggagcctgcgattcagtttcatgttttgcgggactgcaaacactaccttaaaagttttgctagcatatacacccccagggattggtaagcctagaagtagaaaggaagcaatgttagggacacacgtggtgtgggatgtaggtttacaatctacagtgtcattggttgtaccatggatcagtgccagtcagtatagattcactacaccagacacatactcctcagcaggctacattacatgctggtatcaaactaattttgttgttccaccaaacacacctaacactgctgagatgttgtgttttgtatctggatgcaaggacttttgccttcggatggcaagagacacagacctgcacaagcaaacaggaccaataacacaaaatccagtggaaagatatgtagatgaagtcttaaatgaagtgttagtagtgcccaatattaatgagagccaccctaccacatcaaatgcggccccagttttggatgctgctgaaacaggacataccaataagatacagccagaagacactatagaaaccagatatgtgcaatcttcacagacattggatgaaatgagtgtggaaagcttcctaggcagatcggggtgcatccatgaatcagtgttggatattgtggacaattacaatgatcaaagtttcactaaatggaagataaacctgcaagaaatggcacaaattagaagaaaatttgaaatgtttacttatgcaagatttgactctgaaattactatggtaccaagtgtagcagccaaagatggtcacattggtcatatagtcatgcaatatatgtatgtaccaccaggagcacctataccaacaactagaaatgactatgcttggcaatctggaacaaatgcatctgtattttggcagcatgggcaacctttccctcgcttttcacttccctttttgagtattgcatcagcatattacatgttttatgatggttatgatggagacacatataaatccagatatggaactgtagtcaccaatgacatgggaactttgtgttcgcgtattgtgaccagtgagcaattacacaaagtcaaagtggtaacaaggatatatcacaaagccaaacacaccaaagcttggtgcccaagaccacccagagctgttcaatactcacatacacataccaccaactacaaattgagttcagaagtacacaatgatgtggctataagacctagaacaaatctaacaactgttgggcctagtgacatgtatgtgcatgttggtaatctaatatacagaaatctacatttatttaactctgacatacatgattccattttagtgtcttattcatcagatttaatcatataccgaacaagcacacaaggtgatgattatattccaacatgtaattgcactgaagctacatattactgcaaacacaaaaacaggtactacccaattaatgtcacacctcatgactggtatgagatacaagagagtgaatattatccaaaacatatccagtacaatttactaataggtgaaggaccatgtgaaccaggtgattgtggtgggaaattattatgcaaacatggagtgataggtattattacagcaggtggtgagggccatgttgcattcatagatcttagacactttcactgtgctgaagaacaaggaatcactgattacatacacatgctcggcgaagcttttggcagtggatttgtagatagtgttaaagaccagattaattcaataaatcccatcaataacattagcagtaagatggttaaatggatgttaagaattatatcagctatggttataattattagaaactcttcagatccgcaaacaataattgccactttaacactgattggatgcaatggttctccttggagatttctcaaagaaaagttctgtaaatggactcaattaacttatatacacaaagaatcagattcatggctcaaaaaattcactgagatgtgtaatgcagctagggggctagaatggattggaaacaaaatatccaaatttatcgattggatgaaatcaatgctaccccaggcacaattaaaagttaagtatttgagtgaacttaagaaactcaactttctggagaaacaggttgaaaatctcagagcagctgatactaacactcaagaaaaaatcaagtgtgagatagatacattgcatgacttatcctggctagaatgattactaatgagagtgacatatactcacttccaccagaccctaaatattttgatggttatgataaccagagtgtagtaataatggatgacatcatgcaaaaccctggtggtgaggacatgacattattctgtcagatggtatctagtgtgacttttatacccccaatggctgatctaccagataagggaaaaccctttgattctagatttgtattgtgtagtactaatcactcactcttggcacccccaactatatcgtcgctcccagcaatgaatagaagattctatttagatttagatattcttgtgcatgataactacaaagataatcagggtaagttagatgtttctagagcatttcgactatgtgatgttgattcaaagattggaaatgcaaaatgttgtccatttgtatgtggcaaggcagtgacattcaaggaccgcaacacatgtagaacttattcactttcccaaatatacaaccaaattcttgaggaagacaagagaaggagacaggtggttgatgtcatgtctgcaattttccaagggcctatatccatgggtaaacccccaccaccagctataacagaccttttacactcagtaaggacaccagaagtaattaagtactgccaagacaataaatggatagttcctgcggactgccaaattgaaagggatctgaatatagctaatagcataatcacaatcatagctaatatcatcagtatagcagggattatatatataatttataagctcttttgctctctacagggcccttactcgggggagcccaaacctaagacaaaagttcccgagagaagagtggtagctcaaggtccagaagaagaatttggaatgtctattattaaaaataatacctgtgttgtgaccacaacaaatggaaaatttacaggattaggcatttatgacagaatcttaatattaccaacacatgctgacccgggcagtgaaattcaagtaaatggaatacacaccaaagtgcttgattcttatgacttgtttaataaggaaggtgtcaagttggaaattactgtgctaaagttagatagaaatgagaagttcagggatatacgtaagtacatacctgaatcagaagatgactatcctgaatgcaacctagcactagtggccaatcaaacagaaccaactataatcaaagtaggggatgttgtgtcttatggtaatatattacttagtggcacacagacagccagaatgcttaaatataactatcctacaaaatctgggtattgtggtggtgtgttatacaagattggccagatcttaggtatacatgtgggtggcaatggtagagatgggttttcatctatgctattgagatcatacttcactgaacaacaaggccaaattcaaatctctaaacatgttaaagatgttggcttaccctcaatacatacgccaactaaaactaaattgcagccaagtgtcttctatgacatttttccaggcagtaaggaaccagcagtcctcacagaaaaagatcctagattgaaagtggactttgactcagctcttttttcaaaatacaaaggtaacacagagtgcagtttgaatgaacatatacaagttgcagtagcacactactcagctcagctagcaacactagatatagatccacaaccaattgcaatggaagatagtgtttttggaatggatggcttggaagctttggatctgaatactagtgcaggttatccctatgtaacactaggaattaaaaagaaagatcttattaataacaagactaaagatatttccaaacttaagctagcattagacaaatatggtgttgatttgcccatgattactttcttaaaagatgaacttagaaagaaggataagatagcagcaggcaaaaccagagttatagaagctagtagtataaatgataccattttgtttagaacagtttatggaaacctattttctaaatttcacttgaacccaggagtggtaacaggctgtgcagttggatgtgatccagaaaccttttggtctaaaattcccttgatgttagatggagattgcattatggcttttgattatacaaattatgatggtagcattcatccaatttggtttaaagctctcggaatggtacttgataatttatcctttaaccctactctaatcaatagactttgtaaatcaaaacatattttcaagtccacatattatgaagttgaaggtggtgtgccctctggttgttctggaactagtatatttaactcaatgattaataatataatcattagaaccttagttttggatgcatataaacatattgatttagataaacttaaaataattgcctatggtgatgatgtgatcttttcttacaagtataaactagacatggaagccatagccaaggaagggcagaaatatggacttactataacacctgcagataaatctagtgaattcaaagaacttgattatggaaatgtaacttttcttaaaagaggatttagacaagatgataaatacaaatttttgatacatcctacttttccagttgaagagatttatgagtccattagatggacaaagaaaccatctcaaatgcaggagcatgtcttatccttgtgtcacttaatgtggcacaatggtcctgagatttataaggactttgaaacaaagatacgcagtgtcagcgctggacgtgcactgtatatccctccttatgaactcctaagacatgaatggtatgaaaaattctagatatagaattaataaatgaatagtttgttagttttataaaaaaaaaaaaaaaaaaaaaaaaaaaaaaaaaaaaaaaaaaaaaaaaaaaa

SEQ ID NO: 67 - DNA, 7223 bp, Artificial Sequence
  Synthetic sequence
ttaaaacagcggatgggtatcccaccattcgacccattgggtgtagtactctggtactatgtacctttgtacgcctgtttctccccaaccacccttccttaaaattcccacccatgaaacgttagaagcttgacattaaagtacaataggtggcgccatatccaatggtgtctatgtacaagcacttctgtttccccggagcgaggtataggctgtacccactgccaaaagcctttaaccgttatccgccaaccaactacgtaacagttagtaccatcttgttcttgactggacgttcgatcaggtggattttccctccactagtttggtcgatgaggctaggaattccccacgggtgaccgtgtcctagcctgcgtggcggccaacccagcttatgctgggacgcccttttaaggacatggtgtgaagactcgcatgtgcttggttgtgagtcctccggcccctgaatgcggctaaccttaaccctggagccttatgccacgatccagtggttgtaaggtcgtaatgagcaattccgggacgggaccgactactttgggtgtccgtgtttctcatttttcttcatattgtcttatggtcacagcatatatatacatatactgtgatcatgggcgctcaggtttctacacagaaaagtggatctcacgaaaatcaaaacattttgaccaatggatcaaatcagactttcacagttataaattactataaggatgcagcaagtacatcatcagctggtcaatcactgtcaatggacccatctaagtttacagaaccagttaaagatctcatgcttaagggtgcaccagcattgaattcacccaatgttgaggcctgtggttatagtgatagagtacaacaaatcacactcgggaattcaacaataacaacacaagaagcagccaacgctgttgtgtgttatgctgaatggccagagtaccttccagatgtggacgctagtgatgtcaataaaacttcaaaaccagacacttctgtctgtaggttttacacattggatagtaagacatggacaacaggttctaaaggctggtgctggaaattaccagatgcactcaaagatatgggtgtgttcgggcaaaacatgtttttccactcactaggaagatcaggttacacagtacacgttcagtgcaatgccacaaaattccatagcggttgtctacttgtagttgtaataccagaacaccaactggcttcacatgagggtggcaatgtttcagttaaatacacattcacgcatccaggtgaacgtggtatagatttatcatctgcaaatgaagtgggagggcctgtcaaggatgtcatatacaatatgaatggtactttattaggaaatctgctcattttccctcaccagttcattaatctaagaaccaataatacagccacaatagtgataccatacataaactcagtacccattgattcaatgacacgtcacaacaatgtctcactgatggtcatccctattgcccctcttacagtaccaactggagcaactccctcactccctataacagtcacaatagcacctatgtgcactgagttctctgggataaggtccaagtcaattgtgccacaaggtttgccaactacaactttgccggggtcaggacaattcttgaccacagatgacaggcaatcccccagtgcactgccaaattatgagccaactccaagaatacacataccagggaaagttcataacttgctagaaattatacaggtagatacactcattcctatgaacaacacgcatacaaaagatgaggttaacagttacctcataccactaaatgcaaacaggcaaaatgagcaggtttttgggacaaacctgtttattggtgatggggtcttcaaaactactcttctgggtgaaattgttcagtactatacacattggtctggatcacttagattctctttgatgtatactggtcctgccttgtccagtgctaaactcattctagcatacaccccgcctggtgctcgtggtccacaggacaggagagaagcaatgctaggtactcatgttgtctgggatattggtctgcaatccaccatagtaatgacaataccatggacatcaggggtgcagtttagatatactgatccagatacatacaccagtgctggctttctatcatgttggtatcaaacttctcttatacttcccccagaaacgaccggccaggtctacttattatcattcataagtgcatgtccagattttaagcttaggctgatgaaagatactcaaactatctcacagactgttgcactcactgaaggcttaggtgatgaattagaagaagtcatcgttgagaaaacgaaacagacggtggcctcaatctcatctggtccaaaacacacacaaaaagtccccatactaactgcaaacgaaacaggggccacaatgcctgttcttccatcagacagcatagaaaccagaactacctacatgcactttaatggttcagaaactgatgtagaatgctttttgggtcgtgcagcttgtgtgcatgtaactgaaatacaaaacaaagatgctactggaatagataatcacagagaagcaaaattgttcaatgattggaaaatcaacctgtccagccttgtccaacttagaaagaaactagaactcttcacttatgttaggtttgattctgagtataccatactggccactgcatctcaacctgattcagcaaactattcaagcaatttggtggtccaagccatgtatgttccacctggtgccccgaatccaaaagagtgggacgattacacatggcaaagtgcttcaaaccccagtgtattcttcaaggtgggggatacatccaggtttagtgtgccttatgtaggattggcatcagcatataattgtttttatgatggttactcacatgatgatgcagaaactcagtatggcataactgttctaaaccatatgggtagtatggcattcagaatagtaaatgaacatgatgaacataaaactcttgtcaagatcagagtttatcacagggcaaagcacgttgaagcatggattccaagagcacccagagcactaccctacacatcaatagggcgcacaaattatcctaagaatacagaaccagtaattaagaagaggaaaggtgacattaaatcctatggtttaggacctaggtacggtgggatttatacatcaaatgttaaaataatgaattaccacttgatgacaccagaagaccaccataatctgatagcaccctatccaaatagagatttagcaatagtctcaacaggaggacatggtgcagaaacaataccacactgtaactgtacatcaggtgtttactattccacatattacagaaagtattaccccataatttgtgaaaagcccaccaacatctggattgaaggaaacccttattacccaagtagatttcaagcaggagtgatgaaaggggttgggccagcagaaccaggagactgcggtgggattttgagatgcatacatggtcccattggattgttaacagctggaggtagtggatatgtttgttttgctgacatacgacagttggagtgtatcgcagaggaacaggggctgagtgattacatcacaggtttgggtagagcttttggtgtcgggttcactgaccaaatctcaacaaaagtcacagaactacaagaagtggcgaaagatttcctcaccacaaaagttttgtccaaagtggtcaaaatggtttcagctttagtgatcatttgcagaaatcatgatgacttggtcactgttacggccactctagcactacttggatgtgatggatctccctggagatttctgaagatgtacatttccaaacactttcaggtgccttacattgaaagacaagcaaatgatggatggttcagaaagtttaatgatgcatgtaatgctgcaaagggattggaatggattgctaataagatttccaaactgattgaatggataaaaaacaaagtacttccccaagccaaagaaaaactagaattttgtagtaaactcaaacaacttgatatactagagagacaaataaccaccatgcatatctcgaatccaacacaggaaaaacgagagcagttgttcaacaacgtattgtggttggaacaaatgtcgcaaaagtttgccccacattatgccgttgaatcaaaaagaatcagggaactcaagaacaaaatggtaaattatatgcaatttaaaagtaaacaaagaactgaaccagtgtgtgtattaatccatggtacacccggttctggtaaatcattaacaacatccattgtgggacgtgcaattgcagaacacttcaattcagcagtatattcacttccaccagatcccaagcactttgatggttatcagcaacaggaagttgtgattatggatgatctgaaccaaaatccagacggacaggatataagcatgttttgtcaaatggtttcttcagtggatttcttgcctccaatggctagtttagataacaagggcatgttattcaccagtaattttgttctagcctccacaaattctaacacactaagccccccaacaatcttgaatcctgaagctttagtcaggagatttggttttgacctggatatatgtttgcatactacctacacaaagaatggaaaactcaatgcaggcatgtcaaccaagacatgcaaagattgccatcaaccatctaatttcaagaaatgttgccccctggtctgtggaaaagctattagcttggtagacagaactaccaacgttaggtatagtgtggatcaactggtcacagctattataagtgatttcaagagcaaaatgcaaattacagattccctagaaacactgtttcaaggaccagtgtataaagatttagagattgatgtttgcaacacaccacctccagaatgtatcaacgatttactgaaatctgtagattcagaagagattagggaatattgtaagaagaagaaatggattatacctgaaattcctaccaacatagaaagagctatgaatcaagccagcatgattattaatactattctgatgtttgtcagtacattaggtattgtttatgtcatttataaattgtttgctcaaactcaaggaccatattctggtaacccgcctcacaataaactaaaagccccaactttacgcccagttgttgtgcaaggaccaaacacagaatttgcactatccctgttaaggaaaaacataatgactataacaacctcaaagggagagttcacagggttaggcatacatgatcgtgtctgtgtgatacccacacacgcacagcctggtgatgatgtactagtgaatggtcagaaaattagagttaaggataagtacaaattagtagatccagagaacattaatctagagcttacagtgttgactttagatagaaatgaaaaattcagagatatcaggggatttatatcagaagatctagaaggtgtggatgccactttggtagtacattcaaataactttaccaacactatcttagaagttggccctgtaacaatggcaggacttattaatttgagtagcacccccactaacagaatgattcgttatgattatgcaacaaaaactgggcagtgtggaggtgtgctgtgtgctactggtaagatctttggtattcatgttggcggtaatggaagacaaggattttcagctcaacttaaaaaacaatattttgtagagaaacaaggccaagtaatagctagacataaggttagggagtttaacataaatccagtcaacacgccaaccaagtcaaaattacatcccagtgtattctatgatgttttcccaggtgacaaggaacctgctgtattgagtgacaatgatcccagactggaagttaaattgactgaatcattattctctaagtacaaggggaatgtaaatacggaacccactgaaaatatgcttgtggctgtagaccattatgcagggcaactattatcactagatatccccacttctgaacttacactaaaagaagcattatatggagtagatggactagaacctatagatattacaaccagtgcaggatttccctatgtgagtcttgggatcaaaaagagagacattctgaataaagagacccaggacacagaaaagatgaagttttatctagacaagtatggcattgacttgcctctagttacatatattaaggatgaattaagaagtgttgacaaagtccgattagggaaaagtagattaattgaagcctccagtttgaatgattctgttaacatgagaatgaaactaggcaacctttacaaagcattccatcaaaatcccggtgttctgactggatcagcagtgggttgtgatcctgatgtgttttggtctgtcatcccttgcttaatggatgggcacctgatggcatttgattactctaattttgatgcctctttgtcaccagtttggtttgtctgtctagagaaggttttgaccaagttaggctttgcaggctcttcattaattcaatcaatttgtaatacccatcatatctttagggatgaaatatatgtggttgaaggtggcatgccctcagggtgttcaggaaccagcatattcaattccatgatcaacaacataatcattaggactttgatattagatgcatataaaggaatagatttagacaaacttaaaatcttagcttacggtgatgatttgattgtttcttatccttatgaactggatccgcaagtgttggcaactcttggtaaaaattatggactaaccatcacacccccagacaaatctgaaacttttacaaaaatgacatgggaaaacttgacatttttaaagagatacttcaagcctgatcaacaatttccctttttggttcacccagttatgcccatgaaagatatacatgagtcaatcagatggacaaaggatcctaaaaacacacaggatcacgtccgatcattatgcatgttagcatggcactcaggagaaaaagagtacaatgaattcattcagaagatcagaactactgacattggaaaatgtctaattctcccagaatacagcgtacttaggaggcgctggttggacctcttttaggttaacaatatagacacttaatttgagtagaagtaggagtttataaaaaaaaaaa

SEQ ID NO: 68 - DNA, 6014 bp, Artificial Sequence
  Synthetic sequence
ttaaaacagcggatgggtatcccaccattcgacccattgggtgtagtactctggtactatgtacctttgtacgcctgtttctccccaaccacccttccttaaaattcccacccatgaaacgttagaagcttgacattaaagtacaataggtggcgccatatccaatggtgtctatgtacaagcacttctgtttccccggagcgaggtataggctgtacccactgccaaaagcctttaaccgttatccgccaaccaactacgtaacagttagtaccatcttgttcttgactggacgttcgatcaggtggattttccctccactagtttggtcgatgaggctaggaattccccacgggtgaccgtgtcctagcctgcgtggcggccaacccagcttatgctgggacgcccttttaaggacatggtgtgaagactcgcatgtgcttggttgtgagtcctccggcccctgaatgcggctaaccttaaccctggagccttatgccacgatccagtggttgtaaggtcgtaatgagcaattccgggacgggaccgactactttgggtgtccgtgtttctcatttttcttcatattgtcttatggtcacagcatatatatacatatactgtgatcatgggcgctcaggtttctacacagaaaagtggatctcacgaaaatcaaaacattttgaccaatggatcaaatcagactttcacagttataaattactataaggatgcagcaagtacatcatcagctggtcaatcactgtcaatggacccatctaagtttacagaaccagttaaagatctcatgcttaagggtgcaccagcattgaattcacccaatgttgaggcctgtggttatagtgatagagtacaacaaatcacactcgggaattcaacaataacaacacaagaagcagccaacgctgttgtgtgttatgctgaatggccagagtaccttccagatgtggacgctagtgatgtcaataaaacttcaaaaccagacacttctgtctgtaggttttacacattggatagtaagacatggacaacaggttctaaaaagcttaggctgatgaaagatactcaaactatctcacagactgttgcactcactgaaggcttaggtgatgaattagaagaagtcatcgttgagaaaacgaaacagacggtggcctcaatctcatctggtccaaaacacacacaaaaagtccccatactaactgcaaacgaaacaggggccacaatgcctgttcttccatcagacagcatagaaaccagaactacctacatgcactttaatggttcagaaactgatgtagaatgctttttgggtcgtgcagcttgtgtgcatgtaactgaaatacaaaacaaagatgctactggaatagataatcacagagaagcaaaattgttcaatgattggaaaatcaacctgtccagccttgtccaacttagaaagaaactagaactcttcacttatgttaggtttgattctgagtataccatactggccactgcatctcaacctgattcagcaaactattcaagcaatttggtggtccaagccatgtatgttccacctggtgccccgaatccaaaagagtgggacgattacacatggcaaagtgcttcaaaccccagtgtattcttcaaggtgggggatacatccaggtttagtgtgccttatgtaggattggcatcagcatataattgtttttatgatggttactcacatgatgatgcagaaactcagtatggcataactgttctaaaccatatgggtagtatggcattcagaatagtaaatgaacatgatgaacataaaactcttgtcaagatcagagtttatcacagggcaaagcacgttgaagcatggattccaagagcacccagagcactaccctacacatcaatagggcgcacaaattatcctaagaatacagaaccagtaattaagaagaggaaaggtgacattaaatcctatggtttaggacctaggtacggtgggatttatacatcaaatgttaaaataatgaattaccacttgatgacaccagaagaccaccataatctgatagcaccctatccaaatagagatttagcaatagtctcaacaggaggacatggtgcagaaacaataccacactgtaactgtacatcaggtgtttactattccacatattacagaaagtattaccccataatttgtgaaaagcccaccaacatctggattgaaggaaacccttattacccaagtagatttcaagcaggagtgatgaaaggggttgggccagcagaaccaggagactgcggtgggattttgagatgcatacatggtcccattggattgttaacagctggaggtagtggatatgtttgttttgctgacatacgacagttggagtgtatcgcagaggaacaggggctgagtgattacatcacaggtttgggtagagcttttggtgtcgggttcactgaccaaatctcaacaaaagtcacagaactacaagaagtggcgaaagatttcctcaccacaaaagttttgtccaaagtggtcaaaatggtttcagctttagtgatcatttgcagaaatcatgatgacttggtcactgttacggccactctagcactacttggatgtgatggatctccctggagatttctgaagatgtacatttccaaacactttcaggtgccttacattgaaagacaagcaaatgatggatggttcagaaagtttaatgatgcatgtaatgctgcaaagggattggaatggattgctaataagatttccaaactgattgaatggataaaaaacaaagtacttccccaagccaaagaaaaactagaattttgtagtaaactcaaacaacttgatatactagagagacaaataaccaccatgcatatctcgaatccaacacaggaaaaacgagagcagttgttcaacaacgtattgtggttggaacaaatgtcgcaaaagtttgccccacattatgccgttgaatcaaaaagaatcagggaactcaagaacaaaatggtaaattatatgcaatttaaaagtaaacaaagaactgaaccagtgtgtgtattaatccatggtacacccggttctggtaaatcattaacaacatccattgtgggacgtgcaattgcagaacacttcaattcagcagtatattcacttccaccagatcccaagcactttgatggttatcagcaacaggaagttgtgattatggatgatctgaaccaaaatccagacggacaggatataagcatgttttgtcaaatggtttcttcagtggatttcttgcctccaatggctagtttagataacaagggcatgttattcaccagtaattttgttctagcctccacaaattctaacacactaagccccccaacaatcttgaatcctgaagctttagtcaggagatttggttttgacctggatatatgtttgcatactacctacacaaagaatggaaaactcaatgcaggcatgtcaaccaagacatgcaaagattgccatcaaccatctaatttcaagaaatgttgccccctggtctgtggaaaagctattagcttggtagacagaactaccaacgttaggtatagtgtggatcaactggtcacagctattataagtgatttcaagagcaaaatgcaaattacagattccctagaaacactgtttcaaggaccagtgtataaagatttagagattgatgtttgcaacacaccacctccagaatgtatcaacgatttactgaaatctgtagattcagaagagattagggaatattgtaagaagaagaaatggattatacctgaaattcctaccaacatagaaagagctatgaatcaagccagcatgattattaatactattctgatgtttgtcagtacattaggtattgtttatgtcatttataaattgtttgctcaaactcaaggaccatattctggtaacccgcctcacaataaactaaaagccccaactttacgcccagttgttgtgcaaggaccaaacacagaatttgcactatccctgttaaggaaaaacataatgactataacaacctcaaagggagagttcacagggttaggcatacatgatcgtgtctgtgtgatacccacacacgcacagcctggtgatgatgtactagtgaatggtcagaaaattagagttaaggataagtacaaattagtagatccagagaacattaatctagagcttacagtgttgactttagatagaaatgaaaaattcagagatatcaggggatttatatcagaagatctagaaggtgtggatgccactttggtagtacattcaaataactttaccaacactatcttagaagttggccctgtaacaatggcaggacttattaatttgagtagcacccccactaacagaatgattcgttatgattatgcaacaaaaactgggcagtgtggaggtgtgctgtgtgctactggtaagatctttggtattcatgttggcggtaatggaagacaaggattttcagctcaacttaaaaaacaatattttgtagagaaacaaggccaagtaatagctagacataaggttagggagtttaacataaatccagtcaacacgccaaccaagtcaaaattacatcccagtgtattctatgatgttttcccaggtgacaaggaacctgctgtattgagtgacaatgatcccagactggaagttaaattgactgaatcattattctctaagtacaaggggaatgtaaatacggaacccactgaaaatatgcttgtggctgtagaccattatgcagggcaactattatcactagatatccccacttctgaacttacactaaaagaagcattatatggagtagatggactagaacctatagatattacaaccagtgcaggatttccctatgtgagtcttgggatcaaaaagagagacattctgaataaagagacccaggacacagaaaagatgaagttttatctagacaagtatggcattgacttgcctctagttacatatattaaggatgaattaagaagtgttgacaaagtccgattagggaaaagtagattaattgaagcctccagtttgaatgattctgttaacatgagaatgaaactaggcaacctttacaaagcattccatcaaaatcccggtgttctgactggatcagcagtgggttgtgatcctgatgtgttttggtctgtcatcccttgcttaatggatgggcacctgatggcatttgattactctaattttgatgcctctttgtcaccagtttggtttgtctgtctagagaaggttttgaccaagttaggctttgcaggctcttcattaattcaatcaatttgtaatacccatcatatctttagggatgaaatatatgtggttgaaggtggcatgccctcagggtgttcaggaaccagcatattcaattccatgatcaacaacataatcattaggactttgatattagatgcatataaaggaatagatttagacaaacttaaaatcttagcttacggtgatgatttgattgtttcttatccttatgaactggatccgcaagtgttggcaactcttggtaaaaattatggactaaccatcacacccccagacaaatctgaaacttttacaaaaatgacatgggaaaacttgacatttttaaagagatacttcaagcctgatcaacaatttccctttttggttcacccagttatgcccatgaaagatatacatgagtcaatcagatggacaaaggatcctaaaaacacacaggatcacgtccgatcattatgcatgttagcatggcactcaggagaaaaagagtacaatgaattcattcagaagatcagaactactgacattggaaaatgtctaattctcccagaatacagcgtacttaggaggcgctggttggacctcttttaggttaacaatatagacacttaatttgagtagaagtaggagtttataaaaaaaaaaa

SEQ ID NO: 69 - DNA, 6013 bp, Artificial Sequence
  Synthetic sequence
ttaaaacagcggatgggtatcccaccattcgacccattgggtgtagtactctggtactatgtacctttgtacgcctgtttctccccaaccacccttccttaaaattcccacccatgaaacgttagaagcttgacattaaagtacaataggtggcgccatatccaatggtgtctatgtacaagcacttctgtttccccggagcgaggtataggctgtacccactgccaaaagcctttaaccgttatccgccaaccaactacgtaacagttagtaccatcttgttcttgactggacgttcgatcaggtggattttccctccactagtttggtcgatgaggctaggaattccccacgggtgaccgtgtcctagcctgcgtggcggccaacccagcttatgctgggacgcccttttaaggacatggtgtgaagactcgcatgtgcttggttgtgagtcctccggcccctgaatgcggctaaccttaaccctggagccttatgccacgatccagtggttgtaaggtcgtaatgagcaattccgggacgggaccgactactttgggtgtccgtgtttctcatttttcttcatattgtcttatggtcacagcatatatatacatatactgtgatcatgggcgctcaggtttctacacagaaaagtggatctcacgaaaatcaaaacattttgaccaatggatcaaatcagactttcacagttataaattactataaggatgcagcaagtacatcatcagctggtcaatcactgtcaatggacccatctaagtttacagaaccagttaaagatctcatgcttaagggtgcaccagcattgaattcacccaatgttgaggcctgtggttatagtgatagagtacaacaaatcacactcgggaattcaacaataacaacacaagaagcagccaacgctgttgtgtgttatgctgaatggccagagtaccttccagatgtggacgctagtgatgtcaataaaacttcaaaaccagacacttctgtctgtaggttttacacattggatagtaagacatggacaacaggttctaaaagcttaggctgatgaaagatactcaaactatctcacagactgttgcactcactgaaggcttaggtgatgaattagaagaagtcatcgttgagaaaacgaaacagacggtggcctcaatctcatctggtccaaaacacacacaaaaagtccccatactaactgcaaacgaaacaggggccacaatgcctgttcttccatcagacagcatagaaaccagaactacctacatgcactttaatggttcagaaactgatgtagaatgctttttgggtcgtgcagcttgtgtgcatgtaactgaaatacaaaacaaagatgctactggaatagataatcacagagaagcaaaattgttcaatgattggaaaatcaacctgtccagccttgtccaacttagaaagaaactagaactcttcacttatgttaggtttgattctgagtataccatactggccactgcatctcaacctgattcagcaaactattcaagcaatttggtggtccaagccatgtatgttccacctggtgccccgaatccaaaagagtgggacgattacacatggcaaagtgcttcaaaccccagtgtattcttcaaggtgggggatacatccaggtttagtgtgccttatgtaggattggcatcagcatataattgtttttatgatggttactcacatgatgatgcagaaactcagtatggcataactgttctaaaccatatgggtagtatggcattcagaatagtaaatgaacatgatgaacataaaactcttgtcaagatcagagtttatcacagggcaaagcacgttgaagcatggattccaagagcacccagagcactaccctacacatcaatagggcgcacaaattatcctaagaatacagaaccagtaattaagaagaggaaaggtgacattaaatcctatggtttaggacctaggtacggtgggatttatacatcaaatgttaaaataatgaattaccacttgatgacaccagaagaccaccataatctgatagcaccctatccaaatagagatttagcaatagtctcaacaggaggacatggtgcagaaacaataccacactgtaactgtacatcaggtgtttactattccacatattacagaaagtattaccccataatttgtgaaaagcccaccaacatctggattgaaggaaacccttattacccaagtagatttcaagcaggagtgatgaaaggggttgggccagcagaaccaggagactgcggtgggattttgagatgcatacatggtcccattggattgttaacagctggaggtagtggatatgtttgttttgctgacatacgacagttggagtgtatcgcagaggaacaggggctgagtgattacatcacaggtttgggtagagcttttggtgtcgggttcactgaccaaatctcaacaaaagtcacagaactacaagaagtggcgaaagatttcctcaccacaaaagttttgtccaaagtggtcaaaatggtttcagctttagtgatcatttgcagaaatcatgatgacttggtcactgttacggccactctagcactacttggatgtgatggatctccctggagatttctgaagatgtacatttccaaacactttcaggtgccttacattgaaagacaagcaaatgatggatggttcagaaagtttaatgatgcatgtaatgctgcaaagggattggaatggattgctaataagatttccaaactgattgaatggataaaaaacaaagtacttccccaagccaaagaaaaactagaattttgtagtaaactcaaacaacttgatatactagagagacaaataaccaccatgcatatctcgaatccaacacaggaaaaacgagagcagttgttcaacaacgtattgtggttggaacaaatgtcgcaaaagtttgccccacattatgccgttgaatcaaaaagaatcagggaactcaagaacaaaatggtaaattatatgcaatttaaaagtaaacaaagaactgaaccagtgtgtgtattaatccatggtacacccggttctggtaaatcattaacaacatccattgtgggacgtgcaattgcagaacacttcaattcagcagtatattcacttccaccagatcccaagcactttgatggttatcagcaacaggaagttgtgattatggatgatctgaaccaaaatccagacggacaggatataagcatgttttgtcaaatggtttcttcagtggatttcttgcctccaatggctagtttagataacaagggcatgttattcaccagtaattttgttctagcctccacaaattctaacacactaagccccccaacaatcttgaatcctgaagctttagtcaggagatttggttttgacctggatatatgtttgcatactacctacacaaagaatggaaaactcaatgcaggcatgtcaaccaagacatgcaaagattgccatcaaccatctaatttcaagaaatgttgccccctggtctgtggaaaagctattagcttggtagacagaactaccaacgttaggtatagtgtggatcaactggtcacagctattataagtgatttcaagagcaaaatgcaaattacagattccctagaaacactgtttcaaggaccagtgtataaagatttagagattgatgtttgcaacacaccacctccagaatgtatcaacgatttactgaaatctgtagattcagaagagattagggaatattgtaagaagaagaaatggattatacctgaaattcctaccaacatagaaagagctatgaatcaagccagcatgattattaatactattctgatgtttgtcagtacattaggtattgtttatgtcatttataaattgtttgctcaaactcaaggaccatattctggtaacccgcctcacaataaactaaaagccccaactttacgcccagttgttgtgcaaggaccaaacacagaatttgcactatccctgttaaggaaaaacataatgactataacaacctcaaagggagagttcacagggttaggcatacatgatcgtgtctgtgtgatacccacacacgcacagcctggtgatgatgtactagtgaatggtcagaaaattagagttaaggataagtacaaattagtagatccagagaacattaatctagagcttacagtgttgactttagatagaaatgaaaaattcagagatatcaggggatttatatcagaagatctagaaggtgtggatgccactttggtagtacattcaaataactttaccaacactatcttagaagttggccctgtaacaatggcaggacttattaatttgagtagcacccccactaacagaatgattcgttatgattatgcaacaaaaactgggcagtgtggaggtgtgctgtgtgctactggtaagatctttggtattcatgttggcggtaatggaagacaaggattttcagctcaacttaaaaaacaatattttgtagagaaacaaggccaagtaatagctagacataaggttagggagtttaacataaatccagtcaacacgccaaccaagtcaaaattacatcccagtgtattctatgatgttttcccaggtgacaaggaacctgctgtattgagtgacaatgatcccagactggaagttaaattgactgaatcattattctctaagtacaaggggaatgtaaatacggaacccactgaaaatatgcttgtggctgtagaccattatgcagggcaactattatcactagatatccccacttctgaacttacactaaaagaagcattatatggagtagatggactagaacctatagatattacaaccagtgcaggatttccctatgtgagtcttgggatcaaaaagagagacattctgaataaagagacccaggacacagaaaagatgaagttttatctagacaagtatggcattgacttgcctctagttacatatattaaggatgaattaagaagtgttgacaaagtccgattagggaaaagtagattaattgaagcctccagtttgaatgattctgttaacatgagaatgaaactaggcaacctttacaaagcattccatcaaaatcccggtgttctgactggatcagcagtgggttgtgatcctgatgtgttttggtctgtcatcccttgcttaatggatgggcacctgatggcatttgattactctaattttgatgcctctttgtcaccagtttggtttgtctgtctagagaaggttttgaccaagttaggctttgcaggctcttcattaattcaatcaatttgtaatacccatcatatctttagggatgaaatatatgtggttgaaggtggcatgccctcagggtgttcaggaaccagcatattcaattccatgatcaacaacataatcattaggactttgatattagatgcatataaaggaatagatttagacaaacttaaaatcttagcttacggtgatgatttgattgtttcttatccttatgaactggatccgcaagtgttggcaactcttggtaaaaattatggactaaccatcacacccccagacaaatctgaaacttttacaaaaatgacatgggaaaacttgacatttttaaagagatacttcaagcctgatcaacaatttccctttttggttcacccagttatgcccatgaaagatatacatgagtcaatcagatggacaaaggatcctaaaaacacacaggatcacgtccgatcattatgcatgttagcatggcactcaggagaaaaagagtacaatgaattcattcagaagatcagaactactgacattggaaaatgtctaattctcccagaatacagcgtacttaggaggcgctggttggacctcttttaggttaacaatatagacacttaatttgagtagaagtaggagtttataaaaaaaaaaa

SEQ ID NO: 70 - DNA, 6767 bp, Artificial Sequence
  Synthetic sequence
ttaaaacagcggatgggtatcccaccattcgacccattgggtgtagtactctggtactatgtacctttgtacgcctgtttctccccaaccacccttccttaaaattcccacccatgaaacgttagaagcttgacattaaagtacaataggtggcgccatatccaatggtgtctatgtacaagcacttctgtttccccggagcgaggtataggctgtacccactgccaaaagcctttaaccgttatccgccaaccaactacgtaacagttagtaccatcttgttcttgactggacgttcgatcaggtggattttccctccactagtttggtcgatgaggctaggaattccccacgggtgaccgtgtcctagcctgcgtggcggccaacccagcttatgctgggacgcccttttaaggacatggtgtgaagactcgcatgtgcttggttgtgagtcctccggcccctgaatgcggctaaccttaaccctggagccttatgccacgatccagtggttgtaaggtcgtaatgagcaattccgggacgggaccgactactttgggtgtccgtgtttctcatttttcttcatattgtcttatggtcacagcatatatatacatatactgtgatcatgggcgctcaggtttctacacagaaaagtggatctcacgaaaatcaaaacattttgaccaatggatcaaatcagactttcacagttataaattactataaggatgcagcaagtacatcatcagctggtcaatcactgtcaatggacccatctaagtttacagaaccagttaaagatctcatgcttaagggtgcaccagcattgaattcacccaatgttgaggcctgtggttatagtgatagagtacaacaaatcacactcgggaattcaacaataacaacacaagaagcagccaacgctgttgtgtgttatgctgaatggccagagtaccttccagatgtggacgctagtgatgtcaataaaacttcaaaaccagacacttctgtctgtaggttttacacattggatagtaagacatggacaacaggttctaaaggctggtgctggaaattaccagatgcactcaaagatatgggtgtgttcgggcaaaacatgtttttccactcactaggaagatcaggttacacagtacacgttcagtgcaatgccacaaaattccatagcggttgtctacttgtagttgtaataccagaacaccaactggcttcacatgagggtggcaatgtttcagttaaatacacattcacgcatccaggtgaacgtggtatagatttatcatctgcaaatgaagtgggagggcctgtcaaggatgtcatatacaatatgaatggtactttattaggaaatctgctcattttccctcaccagttcattaatctaagaaccaataatacagccacaatagtgataccatacataaactcagtacccattgattcaatgacacgtcacaacaatgtctcactgatggtcatccctattgcccctcttacagtaccaactggagcaactccctcactccctataacagtcacaatagcacctatgtgcactgagttctctgggataaggtccaagtcaattgtgccacaaggtttgccaactacaactttgccggggtcaggacaattcttgaccacagatgacaggcaatcccccagtgcactgccaaattatgagccaactccaagaatacacataccagggaaagttcataacttgctagaaattatacaggtagatacactcattcctatgaacaacacgcatacaaaagatgaggttaacagttacctcataccactaaatgcaaacaggcaaaatgagcaggtttttgggacaaacctgtttattggtgatggggtcttcaaaactactcttctgggtgaaattgttcagtactatacacattggtctggatcacttagattctctttgatgtatactggtcctgccttgtccagtgctaaactcattctagcatacaccccgcctggtgctcgtggtccacaggacaggagagaagcaatgctaggtactcatgttgtctgggatattggtctgcaatccaccatagtaatgacaataccatggacatcaggggtgcagtttagatatactgatccagatacatacaccagtgctggctttctatcatgttggtatcaaacttctcttatacttcccccagaaacgaccggccaggtctacttattatcattcataagtgcatgtccagattttaagcttaggctgatgaaagatactcaaactatctcacagactgttgcactcactgaaggcttaggtgatgaattagaagaagtcatcgttgagaaaacgaaacagacggtggcctcaatctcatctggtccaaaacacacacaaaaagtccccatactaactgcaaacgaaacaggggccacaatgcctgttcttccatcagacagcatagaaaccagaactacctacatgcactttaatggttcagaaactgatgtagaatgctttttgggtcgtgcagcttgtgtgcatgtaactgaaatacaaaacaaagatgctactggaatagataatcacagagaagcaaaattgttcaatgattggaaaatcaacctgtccagccttgtccaacttagaaagaaactagaactcttcacttataatacagaaccagtaattaagaagaggaaaggtgacattaaatcctatggtttaggacctaggtacggtgggatttatacatcaaatgttaaaataatgaattaccacttgatgacaccagaagaccaccataatctgatagcaccctatccaaatagagatttagcaatagtctcaacaggaggacatggtgcagaaacaataccacactgtaactgtacatcaggtgtttactattccacatattacagaaagtattaccccataatttgtgaaaagcccaccaacatctggattgaaggaaacccttattacccaagtagatttcaagcaggagtgatgaaaggggttgggccagcagaaccaggagactgcggtgggattttgagatgcatacatggtcccattggattgttaacagctggaggtagtggatatgtttgttttgctgacatacgacagttggagtgtatcgcagaggaacaggggctgagtgattacatcacaggtttgggtagagcttttggtgtcgggttcactgaccaaatctcaacaaaagtcacagaactacaagaagtggcgaaagatttcctcaccacaaaagttttgtccaaagtggtcaaaatggtttcagctttagtgatcatttgcagaaatcatgatgacttggtcactgttacggccactctagcactacttggatgtgatggatctccctggagatttctgaagatgtacatttccaaacactttcaggtgccttacattgaaagacaagcaaatgatggatggttcagaaagtttaatgatgcatgtaatgctgcaaagggattggaatggattgctaataagatttccaaactgattgaatggataaaaaacaaagtacttccccaagccaaagaaaaactagaattttgtagtaaactcaaacaacttgatatactagagagacaaataaccaccatgcatatctcgaatccaacacaggaaaaacgagagcagttgttcaacaacgtattgtggttggaacaaatgtcgcaaaagtttgccccacattatgccgttgaatcaaaaagaatcagggaactcaagaacaaaatggtaaattatatgcaatttaaaagtaaacaaagaactgaaccagtgtgtgtattaatccatggtacacccggttctggtaaatcattaacaacatccattgtgggacgtgcaattgcagaacacttcaattcagcagtatattcacttccaccagatcccaagcactttgatggttatcagcaacaggaagttgtgattatggatgatctgaaccaaaatccagacggacaggatataagcatgttttgtcaaatggtttcttcagtggatttcttgcctccaatggctagtttagataacaagggcatgttattcaccagtaattttgttctagcctccacaaattctaacacactaagccccccaacaatcttgaatcctgaagctttagtcaggagatttggttttgacctggatatatgtttgcatactacctacacaaagaatggaaaactcaatgcaggcatgtcaaccaagacatgcaaagattgccatcaaccatctaatttcaagaaatgttgccccctggtctgtggaaaagctattagcttggtagacagaactaccaacgttaggtatagtgtggatcaactggtcacagctattataagtgatttcaagagcaaaatgcaaattacagattccctagaaacactgtttcaaggaccagtgtataaagatttagagattgatgtttgcaacacaccacctccagaatgtatcaacgatttactgaaatctgtagattcagaagagattagggaatattgtaagaagaagaaatggattatacctgaaattcctaccaacatagaaagagctatgaatcaagccagcatgattattaatactattctgatgtttgtcagtacattaggtattgtttatgtcatttataaattgtttgctcaaactcaaggaccatattctggtaacccgcctcacaataaactaaaagccccaactttacgcccagttgttgtgcaaggaccaaacacagaatttgcactatccctgttaaggaaaaacataatgactataacaacctcaaagggagagttcacagggttaggcatacatgatcgtgtctgtgtgatacccacacacgcacagcctggtgatgatgtactagtgaatggtcagaaaattagagttaaggataagtacaaattagtagatccagagaacattaatctagagcttacagtgttgactttagatagaaatgaaaaattcagagatatcaggggatttatatcagaagatctagaaggtgtggatgccactttggtagtacattcaaataactttaccaacactatcttagaagttggccctgtaacaatggcaggacttattaatttgagtagcacccccactaacagaatgattcgttatgattatgcaacaaaaactgggcagtgtggaggtgtgctgtgtgctactggtaagatctttggtattcatgttggcggtaatggaagacaaggattttcagctcaacttaaaaaacaatattttgtagagaaacaaggccaagtaatagctagacataaggttagggagtttaacataaatccagtcaacacgccaaccaagtcaaaattacatcccagtgtattctatgatgttttcccaggtgacaaggaacctgctgtattgagtgacaatgatcccagactggaagttaaattgactgaatcattattctctaagtacaaggggaatgtaaatacggaacccactgaaaatatgcttgtggctgtagaccattatgcagggcaactattatcactagatatccccacttctgaacttacactaaaagaagcattatatggagtagatggactagaacctatagatattacaaccagtgcaggatttccctatgtgagtcttgggatcaaaaagagagacattctgaataaagagacccaggacacagaaaagatgaagttttatctagacaagtatggcattgacttgcctctagttacatatattaaggatgaattaagaagtgttgacaaagtccgattagggaaaagtagattaattgaagcctccagtttgaatgattctgttaacatgagaatgaaactaggcaacctttacaaagcattccatcaaaatcccggtgttctgactggatcagcagtgggttgtgatcctgatgtgttttggtctgtcatcccttgcttaatggatgggcacctgatggcatttgattactctaattttgatgcctctttgtcaccagtttggtttgtctgtctagagaaggttttgaccaagttaggctttgcaggctcttcattaattcaatcaatttgtaatacccatcatatctttagggatgaaatatatgtggttgaaggtggcatgccctcagggtgttcaggaaccagcatattcaattccatgatcaacaacataatcattaggactttgatattagatgcatataaaggaatagatttagacaaacttaaaatcttagcttacggtgatgatttgattgtttcttatccttatgaactggatccgcaagtgttggcaactcttggtaaaaattatggactaaccatcacacccccagacaaatctgaaacttttacaaaaatgacatgggaaaacttgacatttttaaagagatacttcaagcctgatcaacaatttccctttttggttcacccagttatgcccatgaaagatatacatgagtcaatcagatggacaaaggatcctaaaaacacacaggatcacgtccgatcattatgcatgttagcatggcactcaggagaaaaagagtacaatgaattcattcagaagatcagaactactgacattggaaaatgtctaattctcccagaatacagcgtacttaggaggcgctggttggacctcttttaggttaacaatatagacacttaatttgagtagaagtaggagtttataaaaaaaaaaa

SEQ ID NO: 71 - DNA, 6766 bp, Artificial Sequence
  Synthetic sequence
ttaaaacagcggatgggtatcccaccattcgacccattgggtgtagtactctggtactatgtacctttgtacgcctgtttctccccaaccacccttccttaaaattcccacccatgaaacgttagaagcttgacattaaagtacaataggtggcgccatatccaatggtgtctatgtacaagcacttctgtttccccggagcgaggtataggctgtacccactgccaaaagcctttaaccgttatccgccaaccaactacgtaacagttagtaccatcttgttcttgactggacgttcgatcaggtggattttccctccactagtttggtcgatgaggctaggaattccccacgggtgaccgtgtcctagcctgcgtggcggccaacccagcttatgctgggacgcccttttaaggacatggtgtgaagactcgcatgtgcttggttgtgagtcctccggcccctgaatgcggctaaccttaaccctggagccttatgccacgatccagtggttgtaaggtcgtaatgagcaattccgggacgggaccgactactttgggtgtccgtgtttctcatttttcttcatattgtcttatggtcacagcatatatatacatatactgtgatcatgggcgctcaggtttctacacagaaaagtggatctcacgaaaatcaaaacattttgaccaatggatcaaatcagactttcacagttataaattactataaggatgcagcaagtacatcatcagctggtcaatcactgtcaatggacccatctaagtttacagaaccagttaaagatctcatgcttaagggtgcaccagcattgaattcacccaatgttgaggcctgtggttatagtgatagagtacaacaaatcacactcgggaattcaacaataacaacacaagaagcagccaacgctgttgtgtgttatgctgaatggccagagtaccttccagatgtggacgctagtgatgtcaataaaacttcaaaaccagacacttctgtctgtaggttttacacattggatagtaagacatggacaacaggttctaaaggctggtgctggaaattaccagatgcactcaaagatatgggtgtgttcgggcaaaacatgtttttccactcactaggaagatcaggttacacagtacacgttcagtgcaatgccacaaaattccatagcggttgtctacttgtagttgtaataccagaacaccaactggcttcacatgagggtggcaatgtttcagttaaatacacattcacgcatccaggtgaacgtggtatagatttatcatctgcaaatgaagtgggagggcctgtcaaggatgtcatatacaatatgaatggtactttattaggaaatctgctcattttccctcaccagttcattaatctaagaaccaataatacagccacaatagtgataccatacataaactcagtacccattgattcaatgacacgtcacaacaatgtctcactgatggtcatccctattgcccctcttacagtaccaactggagcaactccctcactccctataacagtcacaatagcacctatgtgcactgagttctctgggataaggtccaagtcaattgtgccacaaggtttgccaactacaactttgccggggtcaggacaattcttgaccacagatgacaggcaatcccccagtgcactgccaaattatgagccaactccaagaatacacataccagggaaagttcataacttgctagaaattatacaggtagatacactcattcctatgaacaacacgcatacaaaagatgaggttaacagttacctcataccactaaatgcaaacaggcaaaatgagcaggtttttgggacaaacctgtttattggtgatggggtcttcaaaactactcttctgggtgaaattgttcagtactatacacattggtctggatcacttagattctctttgatgtatactggtcctgccttgtccagtgctaaactcattctagcatacaccccgcctggtgctcgtggtccacaggacaggagagaagcaatgctaggtactcatgttgtctgggatattggtctgcaatccaccatagtaatgacaataccatggacatcaggggtgcagtttagatatactgatccagatacatacaccagtgctggctttctatcatgttggtatcaaacttctcttatacttcccccagaaacgaccggccaggtctacttattatcattcataagtgcatgtccagattttaagcttaggctgatgaaagatactcaaactatctcacagactgttgcactcactgaaggcttaggtgatgaattagaagaagtcatcgttgagaaaacgaaacagacggtggcctcaatctcatctggtccaaaacacacacaaaaagtccccatactaactgcaaacgaaacaggggccacaatgcctgttcttccatcagacagcatagaaaccagaactacctacatgcactttaatggttcagaaactgatgtagaatgctttttgggtcgtgcagcttgtgtgcatgtaactgaaatacaaaacaaagatgctactggaatagataatcacagagaagcaaaattgttcaatgattggaaaatcaacctgtccagccttgtccaacttagaaagaaactagaactcttcacttatatacagaaccagtaattaagaagaggaaaggtgacattaaatcctatggtttaggacctaggtacggtgggatttatacatcaaatgttaaaataatgaattaccacttgatgacaccagaagaccaccataatctgatagcaccctatccaaatagagatttagcaatagtctcaacaggaggacatggtgcagaaacaataccacactgtaactgtacatcaggtgtttactattccacatattacagaaagtattaccccataatttgtgaaaagcccaccaacatctggattgaaggaaacccttattacccaagtagatttcaagcaggagtgatgaaaggggttgggccagcagaaccaggagactgcggtgggattttgagatgcatacatggtcccattggattgttaacagctggaggtagtggatatgtttgttttgctgacatacgacagttggagtgtatcgcagaggaacaggggctgagtgattacatcacaggtttgggtagagcttttggtgtcgggttcactgaccaaatctcaacaaaagtcacagaactacaagaagtggcgaaagatttcctcaccacaaaagttttgtccaaagtggtcaaaatggtttcagctttagtgatcatttgcagaaatcatgatgacttggtcactgttacggccactctagcactacttggatgtgatggatctccctggagatttctgaagatgtacatttccaaacactttcaggtgccttacattgaaagacaagcaaatgatggatggttcagaaagtttaatgatgcatgtaatgctgcaaagggattggaatggattgctaataagatttccaaactgattgaatggataaaaaacaaagtacttccccaagccaaagaaaaactagaattttgtagtaaactcaaacaacttgatatactagagagacaaataaccaccatgcatatctcgaatccaacacaggaaaaacgagagcagttgttcaacaacgtattgtggttggaacaaatgtcgcaaaagtttgccccacattatgccgttgaatcaaaaagaatcagggaactcaagaacaaaatggtaaattatatgcaatttaaaagtaaacaaagaactgaaccagtgtgtgtattaatccatggtacacccggttctggtaaatcattaacaacatccattgtgggacgtgcaattgcagaacacttcaattcagcagtatattcacttccaccagatcccaagcactttgatggttatcagcaacaggaagttgtgattatggatgatctgaaccaaaatccagacggacaggatataagcatgttttgtcaaatggtttcttcagtggatttcttgcctccaatggctagtttagataacaagggcatgttattcaccagtaattttgttctagcctccacaaattctaacacactaagccccccaacaatcttgaatcctgaagctttagtcaggagatttggttttgacctggatatatgtttgcatactacctacacaaagaatggaaaactcaatgcaggcatgtcaaccaagacatgcaaagattgccatcaaccatctaatttcaagaaatgttgccccctggtctgtggaaaagctattagcttggtagacagaactaccaacgttaggtatagtgtggatcaactggtcacagctattataagtgatttcaagagcaaaatgcaaattacagattccctagaaacactgtttcaaggaccagtgtataaagatttagagattgatgtttgcaacacaccacctccagaatgtatcaacgatttactgaaatctgtagattcagaagagattagggaatattgtaagaagaagaaatggattatacctgaaattcctaccaacatagaaagagctatgaatcaagccagcatgattattaatactattctgatgtttgtcagtacattaggtattgtttatgtcatttataaattgtttgctcaaactcaaggaccatattctggtaacccgcctcacaataaactaaaagccccaactttacgcccagttgttgtgcaaggaccaaacacagaatttgcactatccctgttaaggaaaaacataatgactataacaacctcaaagggagagttcacagggttaggcatacatgatcgtgtctgtgtgatacccacacacgcacagcctggtgatgatgtactagtgaatggtcagaaaattagagttaaggataagtacaaattagtagatccagagaacattaatctagagcttacagtgttgactttagatagaaatgaaaaattcagagatatcaggggatttatatcagaagatctagaaggtgtggatgccactttggtagtacattcaaataactttaccaacactatcttagaagttggccctgtaacaatggcaggacttattaatttgagtagcacccccactaacagaatgattcgttatgattatgcaacaaaaactgggcagtgtggaggtgtgctgtgtgctactggtaagatctttggtattcatgttggcggtaatggaagacaaggattttcagctcaacttaaaaaacaatattttgtagagaaacaaggccaagtaatagctagacataaggttagggagtttaacataaatccagtcaacacgccaaccaagtcaaaattacatcccagtgtattctatgatgttttcccaggtgacaaggaacctgctgtattgagtgacaatgatcccagactggaagttaaattgactgaatcattattctctaagtacaaggggaatgtaaatacggaacccactgaaaatatgcttgtggctgtagaccattatgcagggcaactattatcactagatatccccacttctgaacttacactaaaagaagcattatatggagtagatggactagaacctatagatattacaaccagtgcaggatttccctatgtgagtcttgggatcaaaaagagagacattctgaataaagagacccaggacacagaaaagatgaagttttatctagacaagtatggcattgacttgcctctagttacatatattaaggatgaattaagaagtgttgacaaagtccgattagggaaaagtagattaattgaagcctccagtttgaatgattctgttaacatgagaatgaaactaggcaacctttacaaagcattccatcaaaatcccggtgttctgactggatcagcagtgggttgtgatcctgatgtgttttggtctgtcatcccttgcttaatggatgggcacctgatggcatttgattactctaattttgatgcctctttgtcaccagtttggtttgtctgtctagagaaggttttgaccaagttaggctttgcaggctcttcattaattcaatcaatttgtaatacccatcatatctttagggatgaaatatatgtggttgaaggtggcatgccctcagggtgttcaggaaccagcatattcaattccatgatcaacaacataatcattaggactttgatattagatgcatataaaggaatagatttagacaaacttaaaatcttagcttacggtgatgatttgattgtttcttatccttatgaactggatccgcaagtgttggcaactcttggtaaaaattatggactaaccatcacacccccagacaaatctgaaacttttacaaaaatgacatgggaaaacttgacatttttaaagagatacttcaagcctgatcaacaatttccctttttggttcacccagttatgcccatgaaagatatacatgagtcaatcagatggacaaaggatcctaaaaacacacaggatcacgtccgatcattatgcatgttagcatggcactcaggagaaaaagagtacaatgaattcattcagaagatcagaactactgacattggaaaatgtctaattctcccagaatacagcgtacttaggaggcgctggttggacctcttttaggttaacaatatagacacttaatttgagtagaagtaggagtttataaaaaaaaaaa

SEQ ID NO: 72 - DNA, 6767 bp, Artificial Sequence
  Synthetic sequence
ttaaaacagcggatgggtatcccaccattcgacccattgggtgtagtactctggtactatgtacctttgtacgcctgtttctccccaaccacccttccttaaaattcccacccatgaaacgttagaagcttgacattaaagtacaataggtggcgccatatccaatggtgtctatgtacaagcacttctgtttccccggagcgaggtataggctgtacccactgccaaaagcctttaaccgttatccgccaaccaactacgtaacagttagtaccatcttgttcttgactggacgttcgatcaggtggattttccctccactagtttggtcgatgaggctaggaattccccacgggtgaccgtgtcctagcctgcgtggcggccaacccagcttatgctgggacgcccttttaaggacatggtgtgaagactcgcatgtgcttggttgtgagtcctccggcccctgaatgcggctaaccttaaccctggagccttatgccacgatccagtggttgtaaggtcgtaatgagcaattccgggacgggaccgactactttgggtgtccgtgtttctcatttttcttcatattgtcttatggtcacagcatatatatacatatactgtgatcatgggcgctcaggtttctacacagaaaagtggatctcacgaaaatcaaaacattttgaccaatggatcaaatcagactttcacagttataaattactataaggatgcagcaagtacatcatcagctggtcaatcactgtcaatggacccatctaagtttacagaaccagttaaagatctcatgcttaagggtgcaccagcattgaattcacccaatgttgaggcctgtggttatagtgatagagtacaacaaatcacactcgggaattcaacaataacaacacaagaagcagccaacgctgttgtgtgttatgctgaatggccagagtaccttccagatgtggacgctagtgatgtcaataaaacttcaaaaccagacacttctgtctgtaggttttacacattggatagtaagacatggacaacaggttctaaaggctggtgctggaaattaccagatgcactcaaagatatgggtgtgttcgggcaaaacatgtttttccactcactaggaagatcaggttacacagtacacgttcagtgcaatgccacaaaattccatagcggttgtctacttgtagttgtaataccagaacaccaactggcttcacatgagggtggcaatgtttcagttaaatacacattcacgcatccaggtgaacgtggtatagatttatcatctgcaaatgaagtgggagggcctgtcaaggatgtcatatacaatatgaatggtactttattaggaaatctgctcattttccctcaccagttcattaatctaagaaccaataatacagccacaatagtgataccatacataaactcagtacccattgattcaatgacacgtcacaacaatgtctcactgatggtcatccctattgcccctcttacagtaccaactggagcaactccctcactccctataacagtcacaatagcacctatgtgcactgagttctctgggataaggtccaagtcaattgtgccacaaggtttgccaactacaactttgccggggtcaggacaattcttgaccacagatgacaggcaatcccccagtgcactgccaaattatgagccaactccaagaatacacataccagggaaagttcataacttgctagaaattatacaggtagatacactcattcctatgaacaacacgcatacaaaagatgaggttaacagttacctcataccactaaatgcaaacaggcaaaatgagcaggtttttgggacaaacctgtttattggtgatggggtcttcaaaactactcttctgggtgaaattgttcagtactatacacattggtctggatcacttagattctctttgatgtatactggtcctgccttgtccagtgctaaactcattctagcatacaccccgcctggtgctcgtggtccacaggacaggagagaagcaatgctaggtactcatgttgtctgggatattggtctgcaatccaccatagtaatgacaataccatggacatcaggggtgcagtttagatatactgatccagatacatacaccagtgctggctttctatcatgttggtatcaaacttctcttatacttcccccagaaacgaccggccaggtctacttattatcattcataagtgcatgtccagattttaagcttaggctgatgaaagatactcaaactatctcacagactgttgcactcactgaaggcttaggtgatgaattagaagaagtcatcgttgagaaaacgaaacagacggtggcctcaatctcatctggtccaaaacacacacaaaaagtccccatactaactgcaaacgaaacaggggccacaatgcctgttcttccatcagacagcatagaaaccagaactacctacatgcactttaatggttcagaaactgatgtagaatgctttttgggtcgtgcagcttgtgtgcatgtaactgaaatacaaaacaaagatgctactggaatagataatcacagagaagcaaaattgttcaatgattggaaaatcaacctgtccagccttgtccaacttagaaagaaactagaactcttcacttataatacagaaccagtaattaagaagaggaaaggtgacattaaatcctatggtttaggacctaggtacggtgggatttatacatcaaatgttaaaataatgaattaccacttgatgacaccagaagaccaccataatctgatagcaccctatccaaatagagatttagcaatagtctcaacaggaggacatggtgcagaaacaataccacactgtaactgtacatcaggtgtttactattccacatattacagaaagtattaccccataatttgtgaaaagcccaccaacatctggattgaaggaaacccttattacccaagtagatttcaagcaggagtgatgaaaggggttgggccagcagaaccaggagactgcggtgggattttgagatgcatacatggtcccattggattgttaacagctggaggtagtggatatgtttgttttgctgacatacgacagttggagtgtatcgcagaggaacaggggctgagtgattacatcacaggtttgggtagagcttttggtgtcgggttcactgaccaaatctcaacaaaagtcacagaactacaagaagtggcgaaagatttcctcaccacaaaagttttgtccaaagtggtcaaaatggtttcagctttagtgatcatttgcagaaatcatgatgacttggtcactgttacggccactctagcactacttggatgtgatggatctccctggagatttctgaagatgtacatttccaaacactttcaggtgccttacattgaaagacaagcaaatgatggatggttcagaaagtttaatgatgcatgtaatgctgcaaagggattggaatggattgctaataagatttccaaactgattgaatggataaaaaacaaagtacttccccaagccaaagaaaaactagaattttgtagtaaactcaaacaacttgatatactagagagacaaataaccaccatgcatatctcgaatccaacacaggaaaaacgagagcagttgttcaacaacgtattgtggttggaacaaatgtcgcaaaagtttgccccacattatgccgttgaatcaaaaagaatcagggaactcaagaacaaaatggtaaattatatgcaatttaaaagtaaacaaagaactgaaccagtgtgtgtattaatccatggtacacccggttctggtaaatcattaacaacatccattgtgggacgtgcaattgcagaacacttcaattcagcagtatattcacttccaccagatcccaagcactttgatggttatcagcaacaggaagttgtgattatggatgatctgaaccaaaatccagacggacaggatataagcatgttttgtcaaatggtttcttcagtggatttcttgcctccaatggctagtttagataacaagggcatgttattcaccagtaattttgttctagcctccacaaattctaacacactaagccccccaacaatcttgaatcctgaagctttagtcaggagatttggttttgacctggatatatgtttgcatactacctacacaaagaatggaaaactcaatgcaggcatgtcaaccaagacatgcaaagattgccatcaaccatctaatttcaagaaatgttgccccctggtctgtggaaaagctattagcttggtagacagaactaccaacgttaggtatagtgtggatcaactggtcacagctattataagtgatttcaagagcaaaatgcaaattacagattccctagaaacactgtttcaaggaccagtgtataaagatttagagattgatgtttgcaacacaccacctccagaatgtatcaacgatttactgaaatctgtagattcagaagagattagggaatattgtaagaagaagaaatggattatacctgaaattcctaccaacatagaaagagctatgaatcaagccagcatgattattaatactattctgatgtttgtcagtacattaggtattgtttatgtcatttataaattgtttgctcaaactcaaggaccatattctggtaacccgcctcacaataaactaaaagccccaactttacgcccagttgttgtgcaaggaccaaacacagaatttgcactatccctgttactcaaaaacataatgactataacaacctcaaagggagagttcacagggttaggcatacatgatcgtgtctgtgtgatacccacacacgcacagcctggtgatgatgtactagtgaatggtcagaaaattagagttaaggataagtacaaattagtagatccagagaacattaatctagagcttacagtgttgactttagatagaaatgaaaaattcagagatatcaggggatttatatcagaagatctagaaggtgtggatgccactttggtagtacattcaaataactttaccaacactatcttagaagttggccctgtaacaatggcaggacttattaatttgagtagcacccccactaacagaatgattcgttatgattatgcaacaaaaactgggcagtgtggaggtgtgctgtgtgctactggtaagatctttggtattcatgttggcggtaatggaagacaaggattttcagctcaacttaaaaaacaatattttgtagagaaacaaggccaagtaatagctagacataaggttagggagtttaacataaatccagtcaacacgccaaccaagtcaaaattacatcccagtgtattctatgatgttttcccaggtgacaaggaacctgctgtattgagtgacaatgatcccagactggaagttaaattgactgaatcattattctctaagtacaaggggaatgtaaatacggaacccactgaaaatatgcttgtggctgtagaccattatgcagggcaactattatcactagatatccccacttctgaacttacactaaaagaagcattatatggagtagatggactagaacctatagatattacaaccagtgcaggatttccctatgtgagtcttgggatcaaaaagagagacattctgaataaagagacccaggacacagaaaagatgaagttttatctagacaagtatggcattgacttgcctctagttacatatattaaggatgaattaagaagtgttgacaaagtccgattagggaaaagtagattaattgaagcctccagtttgaatgattctgttaacatgagaatgaaactaggcaacctttacaaagcattccatcaaaatcccggtgttctgactggatcagcagtgggttgtgatcctgatgtgttttggtctgtcatcccttgcttaatggatgggcacctgatggcatttgattactctaattttgatgcctctttgtcaccagtttggtttgtctgtctagagaaggttttgaccaagttaggctttgcaggctcttcattaattcaatcaatttgtaatacccatcatatctttagggatgaaatatatgtggttgaaggtggcatgccctcagggtgttcaggaaccagcatattcaattccatgatcaacaacataatcattaggactttgatattagatgcatataaaggaatagatttagacaaacttaaaatcttagcttacggtgatgatttgattgtttcttatccttatgaactggatccgcaagtgttggcaactcttggtaaaaattatggactaaccatcacacccccagacaaatctgaaacttttacaaaaatgacatgggaaaacttgacatttttaaagagatacttcaagcctgatcaacaatttccctttttggttcacccagttatgcccatgaaagatatacatgagtcaatcagatggacaaaggatcctaaaaacacacaggatcacgtccgatcattatgcatgttagcatggcactcaggagaaaaagagtacaatgaattcattcagaagatcagaactactgacattggaaaatgtctaattctcccagaatacagcgtacttaggaggcgctggttggacctcttttaggttaacaatatagacacttaatttgagtagaagtaggagtttataaaaaaaaaaa

SEQ ID NO: 73 - DNA, 6767 bp, Artificial Sequence
  Synthetic sequence
ttaaaacagcggatgggtatcccaccattcgacccattgggtgtagtactctggtactatgtacctttgtacgcctgtttctccccaaccacccttccttaaaattcccacccatgaaacgttagaagcttgacattaaagtacaataggtggcgccatatccaatggtgtctatgtacaagcacttctgtttccccggagcgaggtataggctgtacccactgccaaaagcctttaaccgttatccgccaaccaactacgtaacagttagtaccatcttgttcttgactggacgttcgatcaggtggattttccctccactagtttggtcgatgaggctaggaattccccacgggtgaccgtgtcctagcctgcgtggcggccaacccagcttatgctgggacgcccttttaaggacatggtgtgaagactcgcatgtgcttggttgtgagtcctccggcccctgaatgcggctaaccttaaccctggagccttatgccacgatccagtggttgtaaggtcgtaatgagcaattccgggacgggaccgactactttgggtgtccgtgtttctcatttttcttcatattgtcttatggtcacagcatatatatacatatactgtgatcatgggcgctcaggtttctacacagaaaagtggatctcacgaaaatcaaaacattttgaccaatggatcaaatcagactttcacagttataaattactataaggatgcagcaagtacatcatcagctggtcaatcactgtcaatggacccatctaagtttacagaaccagttaaagatctcatgcttaagggtgcaccagcattgaattcacccaatgttgaggcctgtggttatagtgatagagtacaacaaatcacactcgggaattcaacaataacaacacaagaagcagccaacgctgttgtgtgttatgctgaatggccagagtaccttccagatgtggacgctagtgatgtcaataaaacttcaaaaccagacacttctgtctgtaggttttacacattggatagtaagacatggacaacaggttctaaaggctggtgctggaaattaccagatgcactcaaagatatgggtgtgttcgggcaaaacatgtttttccactcactaggaagatcaggttacacagtacacgttcagtgcaatgccacaaaattccatagcggttgtctacttgtagttgtaataccagaacaccaactggcttcacatgagggtggcaatgtttcagttaaatacacattcacgcatccaggtgaacgtggtatagatttatcatctgcaaatgaagtgggagggcctgtcaaggatgtcatatacaatatgaatggtactttattaggaaatctgctcattttccctcaccagttcattaatctaagaaccaataatacagccacaatagtgataccatacataaactcagtacccattgattcaatgacacgtcacaacaatgtctcactgatggtcatccctattgcccctcttacagtaccaactggagcaactccctcactccctataacagtcacaatagcacctatgtgcactgagttctctgggataaggtccaagtcaattgtgccacaaggtttgccaactacaactttgccggggtcaggacaattcttgaccacagatgacaggcaatcccccagtgcactgccaaattatgagccaactccaagaatacacataccagggaaagttcataacttgctagaaattatacaggtagatacactcattcctatgaacaacacgcatacaaaagatgaggttaacagttacctcataccactaaatgcaaacaggcaaaatgagcaggtttttgggacaaacctgtttattggtgatggggtcttcaaaactactcttctgggtgaaattgttcagtactatacacattggtctggatcacttagattctctttgatgtatactggtcctgccttgtccagtgctaaactcattctagcatacaccccgcctggtgctcgtggtccacaggacaggagagaagcaatgctaggtactcatgttgtctgggatattggtctgcaatccaccatagtaatgacaataccatggacatcaggggtgcagtttagatatactgatccagatacatacaccagtgctggctttctatcatgttggtatcaaacttctcttatacttcccccagaaacgaccggccaggtctacttattatcattcataagtgcatgtccagattttaagcttaggctgatgaaagatactcaaactatctcacagactgttgcactcactgaaggcttaggtgatgaattagaagaagtcatcgttgagaaaacgaaacagacggtggcctcaatctcatctggtccaaaacacacacaaaaagtccccatactaactgcaaacgaaacaggggccacaatgcctgttcttccatcagacagcatagaaaccagaactacctacatgcactttaatggttcagaaactgatgtagaatgctttttgggtcgtgcagcttgtgtgcatgtaactgaaatacaaaacaaagatgctactggaatagataatcacagagaagcaaaattgttcaatgattggaaaatcaacctgtccagccttgtccaacttagaaagaaactagaactcttcacttataatacagaaccagtaattaagaagaggaaaggtgacattaaatcctatggtttaggacctaggtacggtgggatttatacatcaaatgttaaaataatgaattaccacttgatgacaccagaagaccaccataatctgatagcaccctatccaaatagagatttagcaatagtctcaacaggaggacatggtgcagaaacaataccacactgtaactgtacatcaggtgtttactattccacatattacagaaagtattaccccataatttgtgaaaagcccaccaacatctggattgaaggaaacccttattacccaagtagatttcaagcaggagtgatgaaaggggttgggccagcagaaccaggagactgcggtgggattttgagatgcatacatggtcccattggattgttaacagctggaggtagtggatatgtttgttttgctgacatacgacagttggagtgtatcgcagaggaacaggggctgagtgattacatcacaggtttgggtagagcttttggtgtcgggttcactgaccaaatctcaacaaaagtcacagaactacaagaagtggcgaaagatttcctcaccacaaaagttttgtccaaagtggtcaaaatggtttcagctttagtgatcatttgcagaaatcatgatgacttggtcactgttacggccactctagcactacttggatgtgatggatctccctggagatttctgaagatgtacatttccaaacactttcaggtgccttacattgaaagacaagcaaatgatggatggttcagaaagtttaatgatgcatgtaatgctgcaaagggattggaatggattgctaataagatttccaaactgattgaatggataaaaaacaaagtacttccccaagccaaagaaaaactagaattttgtagtaaactcaaacaacttgatatactagagagacaaataaccaccatgcatatctcgaatccaacacaggaaaaacgagagcagttgttcaacaacgtattgtggttggaacaaatgtcgcaaaagtttgccccacattatgccgttgaatcaaaaagaatcagggaactcaagaacaaaatggtaaattatatgcaatttaaaagtaaacaaagaactgaaccagtgtgtgtattaatccatggtacacccggttctggtaaatcattaacaacatccattgtgggacgtgcaattgcagaacacttcaattcagcagtatattcacttccaccagatcccaagcactttgatggttatcagcaacaggaagttgtgattatggatgatctgaaccaaaatccagacggacaggatataagcatgttttgtcaaatggtttcttcagtggatttcttgcctccaatggctagtttagataacaagggcatgttattcaccagtaattttgttctagcctccacaaattctaacacactaagccccccaacaatcttgaatcctgaagctttagtcaggagatttggttttgacctggatatatgtttgcatactacctacacaaagaatggaaaactcaatgcaggcatgtcaaccaagacatgcaaagattgccatcaaccatctaatttcaagaaatgttgccccctggtctgtggaaaagctattagcttggtagacagaactaccaacgttaggtatagtgtggatcaactggtcacagctattataagtgatttcaagagcaaaatgcaaattacagattccctagaaacactgtttcaaggaccagtgtataaagatttagagattgatgtttgcaacacaccacctccagaatgtatcaacgatttactgaaatctgtagattcagaagagattagggaatattgtaagaagaagaaatggattatacctgaaattcctaccaacatagaaagagctatgaatcaagccagcatgattattaatactattctgatgtttgtcagtacattaggtattgtttatgtcatttataaattgtttgctcaaactcaaggaccatattctggtaacccgcctcacaataaactaaaagccccaactttacgcccagttgttgtgcaaggaccaaacacagaatttgcactatccctgttaaggctcaacataatgactataacaacctcaaagggagagttcacagggttaggcatacatgatcgtgtctgtgtgatacccacacacgcacagcctggtgatgatgtactagtgaatggtcagaaaattagagttaaggataagtacaaattagtagatccagagaacattaatctagagcttacagtgttgactttagatagaaatgaaaaattcagagatatcaggggatttatatcagaagatctagaaggtgtggatgccactttggtagtacattcaaataactttaccaacactatcttagaagttggccctgtaacaatggcaggacttattaatttgagtagcacccccactaacagaatgattcgttatgattatgcaacaaaaactgggcagtgtggaggtgtgctgtgtgctactggtaagatctttggtattcatgttggcggtaatggaagacaaggattttcagctcaacttaaaaaacaatattttgtagagaaacaaggccaagtaatagctagacataaggttagggagtttaacataaatccagtcaacacgccaaccaagtcaaaattacatcccagtgtattctatgatgttttcccaggtgacaaggaacctgctgtattgagtgacaatgatcccagactggaagttaaattgactgaatcattattctctaagtacaaggggaatgtaaatacggaacccactgaaaatatgcttgtggctgtagaccattatgcagggcaactattatcactagatatccccacttctgaacttacactaaaagaagcattatatggagtagatggactagaacctatagatattacaaccagtgcaggatttccctatgtgagtcttgggatcaaaaagagagacattctgaataaagagacccaggacacagaaaagatgaagttttatctagacaagtatggcattgacttgcctctagttacatatattaaggatgaattaagaagtgttgacaaagtccgattagggaaaagtagattaattgaagcctccagtttgaatgattctgttaacatgagaatgaaactaggcaacctttacaaagcattccatcaaaatcccggtgttctgactggatcagcagtgggttgtgatcctgatgtgttttggtctgtcatcccttgcttaatggatgggcacctgatggcatttgattactctaattttgatgcctctttgtcaccagtttggtttgtctgtctagagaaggttttgaccaagttaggctttgcaggctcttcattaattcaatcaatttgtaatacccatcatatctttagggatgaaatatatgtggttgaaggtggcatgccctcagggtgttcaggaaccagcatattcaattccatgatcaacaacataatcattaggactttgatattagatgcatataaaggaatagatttagacaaacttaaaatcttagcttacggtgatgatttgattgtttcttatccttatgaactggatccgcaagtgttggcaactcttggtaaaaattatggactaaccatcacacccccagacaaatctgaaacttttacaaaaatgacatgggaaaacttgacatttttaaagagatacttcaagcctgatcaacaatttccctttttggttcacccagttatgcccatgaaagatatacatgagtcaatcagatggacaaaggatcctaaaaacacacaggatcacgtccgatcattatgcatgttagcatggcactcaggagaaaaagagtacaatgaattcattcagaagatcagaactactgacattggaaaatgtctaattctcccagaatacagcgtacttaggaggcgctggttggacctcttttaggttaacaatatagacacttaatttgagtagaagtaggagtttataaaaaaaaaaa

SEQ ID NO: 74 - DNA, 6767 bp, Artificial Sequence
  Synthetic sequence
ttaaaacagcggatgggtatcccaccattcgacccattgggtgtagtactctggtactatgtacctttgtacgcctgtttctccccaaccacccttccttaaaattcccacccatgaaacgttagaagcttgacattaaagtacaataggtggcgccatatccaatggtgtctatgtacaagcacttctgtttccccggagcgaggtataggctgtacccactgccaaaagcctttaaccgttatccgccaaccaactacgtaacagttagtaccatcttgttcttgactggacgttcgatcaggtggattttccctccactagtttggtcgatgaggctaggaattccccacgggtgaccgtgtcctagcctgcgtggcggccaacccagcttatgctgggacgcccttttaaggacatggtgtgaagactcgcatgtgcttggttgtgagtcctccggcccctgaatgcggctaaccttaaccctggagccttatgccacgatccagtggttgtaaggtcgtaatgagcaattccgggacgggaccgactactttgggtgtccgtgtttctcatttttcttcatattgtcttatggtcacagcatatatatacatatactgtgatcatgggcgctcaggtttctacacagaaaagtggatctcacgaaaatcaaaacattttgaccaatggatcaaatcagactttcacagttataaattactataaggatgcagcaagtacatcatcagctggtcaatcactgtcaatggacccatctaagtttacagaaccagttaaagatctcatgcttaagggtgcaccagcattgaattcacccaatgttgaggcctgtggttatagtgatagagtacaacaaatcacactcgggaattcaacaataacaacacaagaagcagccaacgctgttgtgtgttatgctgaatggccagagtaccttccagatgtggacgctagtgatgtcaataaaacttcaaaaccagacacttctgtctgtaggttttacacattggatagtaagacatggacaacaggttctaaaggctggtgctggaaattaccagatgcactcaaagatatgggtgtgttcgggcaaaacatgtttttccactcactaggaagatcaggttacacagtacacgttcagtgcaatgccacaaaattccatagcggttgtctacttgtagttgtaataccagaacaccaactggcttcacatgagggtggcaatgtttcagttaaatacacattcacgcatccaggtgaacgtggtatagatttatcatctgcaaatgaagtgggagggcctgtcaaggatgtcatatacaatatgaatggtactttattaggaaatctgctcattttccctcaccagttcattaatctaagaaccaataatacagccacaatagtgataccatacataaactcagtacccattgattcaatgacacgtcacaacaatgtctcactgatggtcatccctattgcccctcttacagtaccaactggagcaactccctcactccctataacagtcacaatagcacctatgtgcactgagttctctgggataaggtccaagtcaattgtgccacaaggtttgccaactacaactttgccggggtcaggacaattcttgaccacagatgacaggcaatcccccagtgcactgccaaattatgagccaactccaagaatacacataccagggaaagttcataacttgctagaaattatacaggtagatacactcattcctatgaacaacacgcatacaaaagatgaggttaacagttacctcataccactaaatgcaaacaggcaaaatgagcaggtttttgggacaaacctgtttattggtgatggggtcttcaaaactactcttctgggtgaaattgttcagtactatacacattggtctggatcacttagattctctttgatgtatactggtcctgccttgtccagtgctaaactcattctagcatacaccccgcctggtgctcgtggtccacaggacaggagagaagcaatgctaggtactcatgttgtctgggatattggtctgcaatccaccatagtaatgacaataccatggacatcaggggtgcagtttagatatactgatccagatacatacaccagtgctggctttctatcatgttggtatcaaacttctcttatacttcccccagaaacgaccggccaggtctacttattatcattcataagtgcatgtccagattttaagcttaggctgatgaaagatactcaaactatctcacagactgttgcactcactgaaggcttaggtgatgaattagaagaagtcatcgttgagaaaacgaaacagacggtggcctcaatctcatctggtccaaaacacacacaaaaagtccccatactaactgcaaacgaaacaggggccacaatgcctgttcttccatcagacagcatagaaaccagaactacctacatgcactttaatggttcagaaactgatgtagaatgctttttgggtcgtgcagcttgtgtgcatgtaactgaaatacaaaacaaagatgctactggaatagataatcacagagaagcaaaattgttcaatgattggaaaatcaacctgtccagccttgtccaacttagaaagaaactagaactcttcacttataatacagaaccagtaattaagaagaggaaaggtgacattaaatcctatggtttaggacctaggtacggtgggatttatacatcaaatgttaaaataatgaattaccacttgatgacaccagaagaccaccataatctgatagcaccctatccaaatagagatttagcaatagtctcaacaggaggacatggtgcagaaacaataccacactgtaactgtacatcaggtgtttactattccacatattacagaaagtattaccccataatttgtgaaaagcccaccaacatctggattgaaggaaacccttattacccaagtagatttcaagcaggagtgatgaaaggggttgggccagcagaaccaggagactgcggtgggattttgagatgcatacatggtcccattggattgttaacagctggaggtagtggatatgtttgttttgctgacatacgacagttggagtgtatcgcagaggaacaggggctgagtgattacatcacaggtttgggtagagcttttggtgtcgggttcactgaccaaatctcaacaaaagtcacagaactacaagaagtggcgaaagatttcctcaccacaaaagttttgtccaaagtggtcaaaatggtttcagctttagtgatcatttgcagaaatcatgatgacttggtcactgttacggccactctagcactacttggatgtgatggatctccctggagatttctgaagatgtacatttccaaacactttcaggtgccttacattgaaagacaagcaaatgatggatggttcagaaagtttaatgatgcatgtaatgctgcaaagggattggaatggattgctaataagatttccaaactgattgaatggataaaaaacaaagtacttccccaagccaaagaaaaactagaattttgtagtaaactcaaacaacttgatatactagagagacaaataaccaccatgcatatctcgaatccaacacaggaaaaacgagagcagttgttcaacaacgtattgtggttggaacaaatgtcgcaaaagtttgccccacattatgccgttgaatcaaaaagaatcagggaactcaagaacaaaatggtaaattatatgcaatttaaaagtaaacaaagaactgaaccagtgtgtgtattaatccatggtacacccggttctggtaaatcattaacaacatccattgtgggacgtgcaattgcagaacacttcaattcagcagtatattcacttccaccagatcccaagcactttgatggttatcagcaacaggaagttgtgattatggatgatctgaaccaaaatccagacggacaggatataagcatgttttgtcaaatggtttcttcagtggatttcttgcctccaatggctagtttagataacaagggcatgttattcaccagtaattttgttctagcctccacaaattctaacacactaagccccccaacaatcttgaatcctgaagctttagtcaggagatttggttttgacctggatatatgtttgcatactacctacacaaagaatggaaaactcaatgcaggcatgtcaaccaagacatgcaaagattgccatcaaccatctaatttcaagaaatgttgccccctggtctgtggaaaagctattagcttggtagacagaactaccaacgttaggtatagtgtggatcaactggtcacagctattataagtgatttcaagagcaaaatgcaaattacagattccctagaaacactgtttcaaggaccagtgtataaagatttagagattgatgtttgcaacacaccacctccagaatgtatcaacgatttactgaaatctgtagattcagaagagattagggaatattgtaagaagaagaaatggattatacctgaaattcctaccaacatagaaagagctatgaatcaagccagcatgattattaatactattctgatgtttgtcagtacattaggtattgtttatgtcatttataaattgtttgctcaaactcaaggaccatattctggtaacccgcctcacaataaactaaaagccccaactttacgcccagttgttgtgcaaggaccaaacacagaatttgcactatccctgttaaggaaaaacataatgactataacaacctcaaagggagagttcacagggttaggcatacatgatcgtgtctgtgtgatacccacacacgcacagcctggtgatgatgtactagtgaatggtcagaaaattagagttaaggataagtacaaattagtagatccagagaacattaatctagagcttacagtgttgactttagatagaaatgaaaaattcctcgatatcaggggatttatatcagaagatctagaaggtgtggatgccactttggtagtacattcaaataactttaccaacactatcttagaagttggccctgtaacaatggcaggacttattaatttgagtagcacccccactaacagaatgattcgttatgattatgcaacaaaaactgggcagtgtggaggtgtgctgtgtgctactggtaagatctttggtattcatgttggcggtaatggaagacaaggattttcagctcaacttaaaaaacaatattttgtagagaaacaaggccaagtaatagctagacataaggttagggagtttaacataaatccagtcaacacgccaaccaagtcaaaattacatcccagtgtattctatgatgttttcccaggtgacaaggaacctgctgtattgagtgacaatgatcccagactggaagttaaattgactgaatcattattctctaagtacaaggggaatgtaaatacggaacccactgaaaatatgcttgtggctgtagaccattatgcagggcaactattatcactagatatccccacttctgaacttacactaaaagaagcattatatggagtagatggactagaacctatagatattacaaccagtgcaggatttccctatgtgagtcttgggatcaaaaagagagacattctgaataaagagacccaggacacagaaaagatgaagttttatctagacaagtatggcattgacttgcctctagttacatatattaaggatgaattaagaagtgttgacaaagtccgattagggaaaagtagattaattgaagcctccagtttgaatgattctgttaacatgagaatgaaactaggcaacctttacaaagcattccatcaaaatcccggtgttctgactggatcagcagtgggttgtgatcctgatgtgttttggtctgtcatcccttgcttaatggatgggcacctgatggcatttgattactctaattttgatgcctctttgtcaccagtttggtttgtctgtctagagaaggttttgaccaagttaggctttgcaggctcttcattaattcaatcaatttgtaatacccatcatatctttagggatgaaatatatgtggttgaaggtggcatgccctcagggtgttcaggaaccagcatattcaattccatgatcaacaacataatcattaggactttgatattagatgcatataaaggaatagatttagacaaacttaaaatcttagcttacggtgatgatttgattgtttcttatccttatgaactggatccgcaagtgttggcaactcttggtaaaaattatggactaaccatcacacccccagacaaatctgaaacttttacaaaaatgacatgggaaaacttgacatttttaaagagatacttcaagcctgatcaacaatttccctttttggttcacccagttatgcccatgaaagatatacatgagtcaatcagatggacaaaggatcctaaaaacacacaggatcacgtccgatcattatgcatgttagcatggcactcaggagaaaaagagtacaatgaattcattcagaagatcagaactactgacattggaaaatgtctaattctcccagaatacagcgtacttaggaggcgctggttggacctcttttaggttaacaatatagacacttaatttgagtagaagtaggagtttataaaaaaaaaaa

SEQ ID NO: 75 - DNA, 6767 bp, Artificial Sequence
  Synthetic sequence
ttaaaacagcggatgggtatcccaccattcgacccattgggtgtagtactctggtactatgtacctttgtacgcctgtttctccccaaccacccttccttaaaattcccacccatgaaacgttagaagcttgacattaaagtacaataggtggcgccatatccaatggtgtctatgtacaagcacttctgtttccccggagcgaggtataggctgtacccactgccaaaagcctttaaccgttatccgccaaccaactacgtaacagttagtaccatcttgttcttgactggacgttcgatcaggtggattttccctccactagtttggtcgatgaggctaggaattccccacgggtgaccgtgtcctagcctgcgtggcggccaacccagcttatgctgggacgcccttttaaggacatggtgtgaagactcgcatgtgcttggttgtgagtcctccggcccctgaatgcggctaaccttaaccctggagccttatgccacgatccagtggttgtaaggtcgtaatgagcaattccgggacgggaccgactactttgggtgtccgtgtttctcatttttcttcatattgtcttatggtcacagcatatatatacatatactgtgatcatgggcgctcaggtttctacacagaaaagtggatctcacgaaaatcaaaacattttgaccaatggatcaaatcagactttcacagttataaattactataaggatgcagcaagtacatcatcagctggtcaatcactgtcaatggacccatctaagtttacagaaccagttaaagatctcatgcttaagggtgcaccagcattgaattcacccaatgttgaggcctgtggttatagtgatagagtacaacaaatcacactcgggaattcaacaataacaacacaagaagcagccaacgctgttgtgtgttatgctgaatggccagagtaccttccagatgtggacgctagtgatgtcaataaaacttcaaaaccagacacttctgtctgtaggttttacacattggatagtaagacatggacaacaggttctaaaggctggtgctggaaattaccagatgcactcaaagatatgggtgtgttcgggcaaaacatgtttttccactcactaggaagatcaggttacacagtacacgttcagtgcaatgccacaaaattccatagcggttgtctacttgtagttgtaataccagaacaccaactggcttcacatgagggtggcaatgtttcagttaaatacacattcacgcatccaggtgaacgtggtatagatttatcatctgcaaatgaagtgggagggcctgtcaaggatgtcatatacaatatgaatggtactttattaggaaatctgctcattttccctcaccagttcattaatctaagaaccaataatacagccacaatagtgataccatacataaactcagtacccattgattcaatgacacgtcacaacaatgtctcactgatggtcatccctattgcccctcttacagtaccaactggagcaactccctcactccctataacagtcacaatagcacctatgtgcactgagttctctgggataaggtccaagtcaattgtgccacaaggtttgccaactacaactttgccggggtcaggacaattcttgaccacagatgacaggcaatcccccagtgcactgccaaattatgagccaactccaagaatacacataccagggaaagttcataacttgctagaaattatacaggtagatacactcattcctatgaacaacacgcatacaaaagatgaggttaacagttacctcataccactaaatgcaaacaggcaaaatgagcaggtttttgggacaaacctgtttattggtgatggggtcttcaaaactactcttctgggtgaaattgttcagtactatacacattggtctggatcacttagattctctttgatgtatactggtcctgccttgtccagtgctaaactcattctagcatacaccccgcctggtgctcgtggtccacaggacaggagagaagcaatgctaggtactcatgttgtctgggatattggtctgcaatccaccatagtaatgacaataccatggacatcaggggtgcagtttagatatactgatccagatacatacaccagtgctggctttctatcatgttggtatcaaacttctcttatacttcccccagaaacgaccggccaggtctacttattatcattcataagtgcatgtccagattttaagcttaggctgatgaaagatactcaaactatctcacagactgttgcactcactgaaggcttaggtgatgaattagaagaagtcatcgttgagaaaacgaaacagacggtggcctcaatctcatctggtccaaaacacacacaaaaagtccccatactaactgcaaacgaaacaggggccacaatgcctgttcttccatcagacagcatagaaaccagaactacctacatgcactttaatggttcagaaactgatgtagaatgctttttgggtcgtgcagcttgtgtgcatgtaactgaaatacaaaacaaagatgctactggaatagataatcacagagaagcaaaattgttcaatgattggaaaatcaacctgtccagccttgtccaacttagaaagaaactagaactcttcacttataatacagaaccagtaattaagaagaggaaaggtgacattaaatcctatggtttaggacctaggtacggtgggatttatacatcaaatgttaaaataatgaattaccacttgatgacaccagaagaccaccataatctgatagcaccctatccaaatagagatttagcaatagtctcaacaggaggacatggtgcagaaacaataccacactgtaactgtacatcaggtgtttactattccacatattacagaaagtattaccccataatttgtgaaaagcccaccaacatctggattgaaggaaacccttattacccaagtagatttcaagcaggagtgatgaaaggggttgggccagcagaaccaggagactgcggtgggattttgagatgcatacatggtcccattggattgttaacagctggaggtagtggatatgtttgttttgctgacatacgacagttggagtgtatcgcagaggaacaggggctgagtgattacatcacaggtttgggtagagcttttggtgtcgggttcactgaccaaatctcaacaaaagtcacagaactacaagaagtggcgaaagatttcctcaccacaaaagttttgtccaaagtggtcaaaatggtttcagctttagtgatcatttgcagaaatcatgatgacttggtcactgttacggccactctagcactacttggatgtgatggatctccctggagatttctgaagatgtacatttccaaacactttcaggtgccttacattgaaagacaagcaaatgatggatggttcagaaagtttaatgatgcatgtaatgctgcaaagggattggaatggattgctaataagatttccaaactgattgaatggataaaaaacaaagtacttccccaagccaaagaaaaactagaattttgtagtaaactcaaacaacttgatatactagagagacaaataaccaccatgcatatctcgaatccaacacaggaaaaacgagagcagttgttcaacaacgtattgtggttggaacaaatgtcgcaaaagtttgccccacattatgccgttgaatcaaaaagaatcagggaactcaagaacaaaatggtaaattatatgcaatttaaaagtaaacaaagaactgaaccagtgtgtgtattaatccatggtacacccggttctggtaaatcattaacaacatccattgtgggacgtgcaattgcagaacacttcaattcagcagtatattcacttccaccagatcccaagcactttgatggttatcagcaacaggaagttgtgattatggatgatctgaaccaaaatccagacggacaggatataagcatgttttgtcaaatggtttcttcagtggatttcttgcctccaatggctagtttagataacaagggcatgttattcaccagtaattttgttctagcctccacaaattctaacacactaagccccccaacaatcttgaatcctgaagctttagtcaggagatttggttttgacctggatatatgtttgcatactacctacacaaagaatggaaaactcaatgcaggcatgtcaaccaagacatgcaaagattgccatcaaccatctaatttcaagaaatgttgccccctggtctgtggaaaagctattagcttggtagacagaactaccaacgttaggtatagtgtggatcaactggtcacagctattataagtgatttcaagagcaaaatgcaaattacagattccctagaaacactgtttcaaggaccagtgtataaagatttagagattgatgtttgcaacacaccacctccagaatgtatcaacgatttactgaaatctgtagattcagaagagattagggaatattgtaagaagaagaaatggattatacctgaaattcctaccaacatagaaagagctatgaatcaagccagcatgattattaatactattctgatgtttgtcagtacattaggtattgtttatgtcatttataaattgtttgctcaaactcaaggaccatattctggtaacccgcctcacaataaactaaaagccccaactttacgcccagttgttgtgcaaggaccaaacacagaatttgcactatccctgttaaggaaaaacataatgactataacaacctcaaagggagagttcacagggttaggcatacatgatcgtgtctgtgtgatacccacacacgcacagcctggtgatgatgtactagtgaatggtcagaaaattagagttaaggataagtacaaattagtagatccagagaacattaatctagagcttacagtgttgactttagatagaaatgaaaaattcagagatatcaggggatttatatcagaagatctagaaggtgtggatgccactttggtagtacattcaaataactttaccaacactatcttagaagttggccctgtaacaatggcaggacttattaatttgagtagcacccccactaacagaatgattcgttatgattatgcaacaaaaactgggcagtgtggaggtgtgctgtgtgctactggtaagatctttggtattcatgttggcggtaatggaagacaaggattttcagctcaacttaaaaaacaatattttgtagagaaacaaggccaagtaatagctagacataaggttagggagtttaacataaatccagtcaacacgccaaccaagtcaaaattacatcccagtgtattctatgatgttttcccaggtgacaaggaacctgctgtattgagtgacaatgatcccagactggaagttaaattgactgaatcattattctctaagtacaaggggaatgtaaatacggaacccactgaaaatatgcttgtggctgtagaccattatgcagggcaactattatcactagatatccccacttctgaacttacactaaaagaagcattatatggagtagatggactagaacctatagatattacaaccagtgcaggatttccctatgtgagtcttgggatcaaaaagagagacattctgaataaagagacccaggacacagaaaagatgaagttttatctagacaagtatggcattgacttgcctctagttacatatattaaggatgaattaagaagtgttgacaaagtccgattagggaaaagtagattaattgaagcctccagtttgaatgattctgttaacatgagaatgaaactaggcaacctttacaaagcattccatcaaaatcccggtgttctgactggatcagcagtgggttgtgatcctgatgtgttttggtctgtcatcccttgcttaatggatgggcacctgatggcatttgattactctaattttgatgcctctttgtcaccagtttggtttgtctgtctagagaaggttttgaccaagttaggctttgcaggctcttcattaattcaatcaatttgtaatacccatcatatctttagggatgaaatatatgtggttgaaggtggcatgccctcagggtgttcaggaaccagcatattcaattccatgatcaacaacataatcattaggactttgatattagatgcatataaaggaatagatttagacaaacttaaaatcttagcttacggtgatgatttgattgtttcttatccttatgaactggatccgcaagtgttggcaactcttggtaaaaattatggactaaccatcacacccccagacaaatctgaaacttttacaaaaatgacatgggaaaacttgacatttttaaagagatacttcaagcctgatcaacaatttccctttttggttcacccagttatgcccatgaaagatatacatgagtcaatcagatggacaaaggatcctaaaaacacacaggatcacgtccgatcattatgcatgttagcatggcactcaggagaaaaagagtacaatgaattcattcagaagatcagaactactgacattggaaaatgtctagacctcccagaatacagcgtacttagggaccgctggttggacctcttttaggttaacaatatagacacttaatttgagtagaagtaggagtttataaaaaaaaaaa

SEQ ID NO: 76 - DNA, 6767 bp, Artificial Sequence
  Synthetic sequence
ttaaaacagcggatgggtatcccaccattcgacccattgggtgtagtactctggtactatgtacctttgtacgcctgtttctccccaaccacccttccttaaaattcccacccatgaaacgttagaagcttgacattaaagtacaataggtggcgccatatccaatggtgtctatgtacaagcacttctgtttccccggagcgaggtataggctgtacccactgccaaaagcctttaaccgttatccgccaaccaactacgtaacagttagtaccatcttgttcttgactggacgttcgatcaggtggattttccctccactagtttggtcgatgaggctaggaattccccacgggtgaccgtgtcctagcctgcgtggcggccaacccagcttatgctgggacgcccttttaaggacatggtgtgaagactcgcatgtgcttggttgtgagtcctccggcccctgaatgcggctaaccttaaccctggagccttatgccacgatccagtggttgtaaggtcgtaatgagcaattccgggacgggaccgactactttgggtgtccgtgtttctcatttttcttcatattgtcttatggtcacagcatatatatacatatactgtgatcatgggcgctcaggtttctacacagaaaagtggatctcacgaaaatcaaaacattttgaccaatggatcaaatcagactttcacagttataaattactataaggatgcagcaagtacatcatcagctggtcaatcactgtcaatggacccatctaagtttacagaaccagttaaagatctcatgcttaagggtgcaccagcattgaattcacccaatgttgaggcctgtggttatagtgatagagtacaacaaatcacactcgggaattcaacaataacaacacaagaagcagccaacgctgttgtgtgttatgctgaatggccagagtaccttccagatgtggacgctagtgatgtcaataaaacttcaaaaccagacacttctgtctgtaggttttacacattggatagtaagacatggacaacaggttctaaaggctggtgctggaaattaccagatgcactcaaagatatgggtgtgttcgggcaaaacatgtttttccactcactaggaagatcaggttacacagtacacgttcagtgcaatgccacaaaattccatagcggttgtctacttgtagttgtaataccagaacaccaactggcttcacatgagggtggcaatgtttcagttaaatacacattcacgcatccaggtgaacgtggtatagatttatcatctgcaaatgaagtgggagggcctgtcaaggatgtcatatacaatatgaatggtactttattaggaaatctgctcattttccctcaccagttcattaatctaagaaccaataatacagccacaatagtgataccatacataaactcagtacccattgattcaatgacacgtcacaacaatgtctcactgatggtcatccctattgcccctcttacagtaccaactggagcaactccctcactccctataacagtcacaatagcacctatgtgcactgagttctctgggataaggtccaagtcaattgtgccacaaggtttgccaactacaactttgccggggtcaggacaattcttgaccacagatgacaggcaatcccccagtgcactgccaaattatgagccaactccaagaatacacataccagggaaagttcataacttgctagaaattatacaggtagatacactcattcctatgaacaacacgcatacaaaagatgaggttaacagttacctcataccactaaatgcaaacaggcaaaatgagcaggtttttgggacaaacctgtttattggtgatggggtcttcaaaactactcttctgggtgaaattgttcagtactatacacattggtctggatcacttagattctctttgatgtatactggtcctgccttgtccagtgctaaactcattctagcatacaccccgcctggtgctcgtggtccacaggacaggagagaagcaatgctaggtactcatgttgtctgggatattggtctgcaatccaccatagtaatgacaataccatggacatcaggggtgcagtttagatatactgatccagatacatacaccagtgctggctttctatcatgttggtatcaaacttctcttatacttcccccagaaacgaccggccaggtctacttattatcattcataagtgcatgtccagattttaagcttaggctgatgaaagatactcaaactatctcacagactgttgcactcactgaaggcttaggtgatgaattagaagaagtcatcgttgagaaaacgaaacagacggtggcctcaatctcatctggtccaaaacacacacaaaaagtccccatactaactgcaaacgaaacaggggccacaatgcctgttcttccatcagacagcatagaaaccagaactacctacatgcactttaatggttcagaaactgatgtagaatgctttttgggtcgtgcagcttgtgtgcatgtaactgaaatacaaaacaaagatgctactggaatagataatcacagagaagcaaaattgttcaatgattggaaaatcaacctgtccagccttgtccaacttagaaagaaactagaactcttcacttataatacagaaccagtaattaagaagaggaaaggtgacattaaatcctatggtttaggacctaggtacggtgggatttatacatcaaatgttaaaataatgaattaccacttgatgacaccagaagaccaccataatctgatagcaccctatccaaatagagatttagcaatagtctcaacaggaggacatggtgcagaaacaataccacactgtaactgtacatcaggtgtttactattccacatattacagaaagtattaccccataatttgtgaaaagcccaccaacatctggattgaaggaaacccttattacccaagtagatttcaagcaggagtgatgaaaggggttgggccagcagaaccaggagactgcggtgggattttgagatgcatacatggtcccattggattgttaacagctggaggtagtggatatgtttgttttgctgacatacgacagttggagtgtatcgcagaggaacaggggctgagtgattacatcacaggtttgggtagagcttttggtgtcgggttcactgaccaaatctcaacaaaagtcacagaactacaagaagtggcgaaagatttcctcaccacaaaagttttgtccaaagtggtcaaaatggtttcagctttagtgatcatttgcagaaatcatgatgacttggtcactgttacggccactctagcactacttggatgtgatggatctccctggagatttctgaagatgtacatttccaaacactttcaggtgccttacattgaaagacaagcaaatgatggatggttcagaaagtttaatgatgcatgtaatgctgcaaagggattggaatggattgctaataagatttccaaactgattgaatggataaaaaacaaagtacttccccaagccaaagaaaaactagaattttgtagtaaactcaaacaacttgatatactagagagacaaataaccaccatgcatatctcgaatccaacacaggaaaaacgagagcagttgttcaacaacgtattgtggttggaacaaatgtcgcaaaagtttgccccacattatgccgttgaatcaaaaagaatcagggaactcaagaacaaaatggtaaattatatgcaatttaaaagtaaacaaagaactgaaccagtgtgtgtattaatccatggtacacccggttctggtaaatcattaacaacatccattgtgggacgtgcaattgcagaacacttcaattcagcagtatattcacttccaccagatcccaagcactttgatggttatcagcaacaggaagttgtgattatggatgatctgaaccaaaatccagacggacaggatataagcatgttttgtcaaatggtttcttcagtggatttcttgcctccaatggctagtttagataacaagggcatgttattcaccagtaattttgttctagcctccacaaattctaacacactaagccccccaacaatcttgaatcctgaagctttagtcaggagatttggttttgacctggatatatgtttgcatactacctacacaaagaatggaaaactcaatgcaggcatgtcaaccaagacatgcaaagattgccatcaaccatctaatttcaagaaatgttgccccctggtctgtggaaaagctattagcttggtagacagaactaccaacgttaggtatagtgtggatcaactggtcacagctattataagtgatttcaagagcaaaatgcaaattacagattccctagaaacactgtttcaaggaccagtgtataaagatttagagattgatgtttgcaacacaccacctccagaatgtatcaacgatttactgaaatctgtagattcagaagagattagggaatattgtaagaagaagaaatggattatacctgaaattcctaccaacatagaaagagctatgaatcaagccagcatgattattaatactattctgatgtttgtcagtacattaggtattgtttatgtcatttataaattgtttgctcaaactcaaggaccatattctggtaacccgcctcacaataaactaaaagccccaactttacgcccagttgttgtgcaaggaccaaacacagaatttgcactatccctgttaaggaaaaacataatgactataacaacctcaaagggagagttcacagggttaggcatacatgatcgtgtctgtgtgatacccacacacgcacagcctggtgatgatgtactagtgaatggtcagaaaattagagttaaggataagtacaaattagtagatccagagaacattaatctagagcttacagtgttgactttagatagaaatgaaaaattcagagatatcaggggatttatatcagaagatctagaaggtgtggatgccactttggtagtacattcaaataactttaccaacactatcttagaagttggccctgtaacaatggcaggacttattaatttgagtagcacccccactaacagaatgattcgttatgattatgcaacaaaaactgggcagtgtggaggtgtgctgtgtgctactggtaagatctttggtattcatgttggcggtaatggaagacaaggattttcagctcaacttaaaaaacaatattttgtagagaaacaaggccaagtaatagctagacataaggttagggagtttaacataaatccagtcaacacgccaaccaagtcaaaattacatcccagtgtattctatgatgttttcccaggtgacaaggaacctgctgtattgagtgacaatgatcccagactggaagttaaattgactgaatcattattctctaagtacaaggggaatgtaaatacggaacccactgaaaatatgcttgtggctgtagaccattatgcagggcaactattatcactagatatccccacttctgaacttacactaaaagaagcattatatggagtagatggactagaacctatagatattacaaccagtgcaggatttccctatgtgagtcttgggatcaaaaagagagacattctgaataaagagacccaggacacagaaaagatgaagttttatctagacaagtatggcattgacttgcctctagttacatatattaaggatgaattaagaagtgttgacaaagtccgattagggaaaagtagattaattgaagcctccagtttgaatgattctgttaacatgagaatgaaactaggcaacctttacaaagcattccatcaaaatcccggtgttctgactggatcagcagtgggttgtgatcctgatgtgttttggtctgtcatcccttgcttaatggatgggcacctgatggcatttgattactctaattttgatgcctctttgtcaccagtttggtttgtctgtctagagaaggttttgaccaagttaggctttgcaggctcttcattaattcaatcaatttgtaatacccatcatatctttagggatgaaatatatgtggttgaaggtggcatgccctcagggtgttcaggaaccagcatattcaattccatgatcaacaacataatcattaggactttgatattagatgcatataaaggaatagatttagacaaacttaaaatcttagcttacggtgcggcgttgattgtttcttatccttatgaactggatccgcaagtgttggcaactcttggtaaaaattatggactaaccatcacacccccagacaaatctgaaacttttacaaaaatgacatgggaaaacttgacatttttaaagagatacttcaagcctgatcaacaatttccctttttggttcacccagttatgcccatgaaagatatacatgagtcaatcagatggacaaaggatcctaaaaacacacaggatcacgtccgatcattatgcatgttagcatggcactcaggagaaaaagagtacaatgaattcattcagaagatcagaactactgacattggaaaatgtctaattctcccagaatacagcgtacttaggaggcgctggttggacctcttttaggttaacaatatagacacttaatttgagtagaagtaggagtttataaaaaaaaaaa

SEQ ID NO: 77 - DNA, 5558 bp, Artificial Sequence
  Synthetic sequence
ttaaaacagcggatgggtatcccaccattcgacccattgggtgtagtactctggtactatgtacctttgtacgcctgtttctccccaaccacccttccttaaaattcccacccatgaaacgttagaagcttgacattaaagtacaataggtggcgccatatccaatggtgtctatgtacaagcacttctgtttccccggagcgaggtataggctgtacccactgccaaaagcctttaaccgttatccgccaaccaactacgtaacagttagtaccatcttgttcttgactggacgttcgatcaggtggattttccctccactagtttggtcgatgaggctaggaattccccacgggtgaccgtgtcctagcctgcgtggcggccaacccagcttatgctgggacgcccttttaaggacatggtgtgaagactcgcatgtgcttggttgtgagtcctccggcccctgaatgcggctaaccttaaccctggagccttatgccacgatccagtggttgtaaggtcgtaatgagcaattccgggacgggaccgactactttgggtgtccgtgtttctcatttttcttcatattgtcttatggtcacagcatatatatacatatactgtgatcatgggcgctcaggtttctacacagaaaagtggatctcacgaaaatcaaaacattttgaccaatggatcaaatcagactttcacagttataaattactataaggatgcagcaagtacatcatcagctggtcaatcactgtcaatggacccatctaagtttacagaaccagttaaagatctcatgcttaagggtgcaccagcattgaattcacccaatgttgaggcctgtggttatagtgatagagtacaacaaatcacactcgggaattcaacaataacaacacaagaagcagccaacgctgttgtgtgttatgctgaatggccagagtaccttccagatgtggacgctagtgatgtcaataaaacttcaaaaccagacacttctgtctgtaggttttacacattggatagtaagacatggacaacaggttctaaaaagcttaggctgatgaaagatactcaaactatctcacagactgttgcactcactgaaggcttaggtgatgaattagaagaagtcatcgttgagaaaacgaaacagacggtggcctcaatctcatctggtccaaaacacacacaaaaagtccccatactaactgcaaacgaaacaggggccacaatgcctgttcttccatcagacagcatagaaaccagaactacctacatgcactttaatggttcagaaactgatgtagaatgctttttgggtcgtgcagcttgtgtgcatgtaactgaaatacaaaacaaagatgctactggaatagataatcacagagaagcaaaattgttcaatgattggaaaatcaacctgtccagccttgtccaacttagaaagaaactagaactcttcacttataatacagaaccagtaattaagaagaggaaaggtgacattaaatcctatggtttaggacctaggtacggtgggatttatacatcaaatgttaaaataatgaattaccacttgatgacaccagaagaccaccataatctgatagcaccctatccaaatagagatttagcaatagtctcaacaggaggacatggtgcagaaacaataccacactgtaactgtacatcaggtgtttactattccacatattacagaaagtattaccccataatttgtgaaaagcccaccaacatctggattgaaggaaacccttattacccaagtagatttcaagcaggagtgatgaaaggggttgggccagcagaaccaggagactgcggtgggattttgagatgcatacatggtcccattggattgttaacagctggaggtagtggatatgtttgttttgctgacatacgacagttggagtgtatcgcagaggaacaggggctgagtgattacatcacaggtttgggtagagcttttggtgtcgggttcactgaccaaatctcaacaaaagtcacagaactacaagaagtggcgaaagatttcctcaccacaaaagttttgtccaaagtggtcaaaatggtttcagctttagtgatcatttgcagaaatcatgatgacttggtcactgttacggccactctagcactacttggatgtgatggatctccctggagatttctgaagatgtacatttccaaacactttcaggtgccttacattgaaagacaagcaaatgatggatggttcagaaagtttaatgatgcatgtaatgctgcaaagggattggaatggattgctaataagatttccaaactgattgaatggataaaaaacaaagtacttccccaagccaaagaaaaactagaattttgtagtaaactcaaacaacttgatatactagagagacaaataaccaccatgcatatctcgaatccaacacaggaaaaacgagagcagttgttcaacaacgtattgtggttggaacaaatgtcgcaaaagtttgccccacattatgccgttgaatcaaaaagaatcagggaactcaagaacaaaatggtaaattatatgcaatttaaaagtaaacaaagaactgaaccagtgtgtgtattaatccatggtacacccggttctggtaaatcattaacaacatccattgtgggacgtgcaattgcagaacacttcaattcagcagtatattcacttccaccagatcccaagcactttgatggttatcagcaacaggaagttgtgattatggatgatctgaaccaaaatccagacggacaggatataagcatgttttgtcaaatggtttcttcagtggatttcttgcctccaatggctagtttagataacaagggcatgttattcaccagtaattttgttctagcctccacaaattctaacacactaagccccccaacaatcttgaatcctgaagctttagtcaggagatttggttttgacctggatatatgtttgcatactacctacacaaagaatggaaaactcaatgcaggcatgtcaaccaagacatgcaaagattgccatcaaccatctaatttcaagaaatgttgccccctggtctgtggaaaagctattagcttggtagacagaactaccaacgttaggtatagtgtggatcaactggtcacagctattataagtgatttcaagagcaaaatgcaaattacagattccctagaaacactgtttcaaggaccagtgtataaagatttagagattgatgtttgcaacacaccacctccagaatgtatcaacgatttactgaaatctgtagattcagaagagattagggaatattgtaagaagaagaaatggattatacctgaaattcctaccaacatagaaagagctatgaatcaagccagcatgattattaatactattctgatgtttgtcagtacattaggtattgtttatgtcatttataaattgtttgctcaaactcaaggaccatattctggtaacccgcctcacaataaactaaaagccccaactttacgcccagttgttgtgcaaggaccaaacacagaatttgcactatccctgttaaggaaaaacataatgactataacaacctcaaagggagagttcacagggttaggcatacatgatcgtgtctgtgtgatacccacacacgcacagcctggtgatgatgtactagtgaatggtcagaaaattagagttaaggataagtacaaattagtagatccagagaacattaatctagagcttacagtgttgactttagatagaaatgaaaaattcagagatatcaggggatttatatcagaagatctagaaggtgtggatgccactttggtagtacattcaaataactttaccaacactatcttagaagttggccctgtaacaatggcaggacttattaatttgagtagcacccccactaacagaatgattcgttatgattatgcaacaaaaactgggcagtgtggaggtgtgctgtgtgctactggtaagatctttggtattcatgttggcggtaatggaagacaaggattttcagctcaacttaaaaaacaatattttgtagagaaacaaggccaagtaatagctagacataaggttagggagtttaacataaatccagtcaacacgccaaccaagtcaaaattacatcccagtgtattctatgatgttttcccaggtgacaaggaacctgctgtattgagtgacaatgatcccagactggaagttaaattgactgaatcattattctctaagtacaaggggaatgtaaatacggaacccactgaaaatatgcttgtggctgtagaccattatgcagggcaactattatcactagatatccccacttctgaacttacactaaaagaagcattatatggagtagatggactagaacctatagatattacaaccagtgcaggatttccctatgtgagtcttgggatcaaaaagagagacattctgaataaagagacccaggacacagaaaagatgaagttttatctagacaagtatggcattgacttgcctctagttacatatattaaggatgaattaagaagtgttgacaaagtccgattagggaaaagtagattaattgaagcctccagtttgaatgattctgttaacatgagaatgaaactaggcaacctttacaaagcattccatcaaaatcccggtgttctgactggatcagcagtgggttgtgatcctgatgtgttttggtctgtcatcccttgcttaatggatgggcacctgatggcatttgattactctaattttgatgcctctttgtcaccagtttggtttgtctgtctagagaaggttttgaccaagttaggctttgcaggctcttcattaattcaatcaatttgtaatacccatcatatctttagggatgaaatatatgtggttgaaggtggcatgccctcagggtgttcaggaaccagcatattcaattccatgatcaacaacataatcattaggactttgatattagatgcatataaaggaatagatttagacaaacttaaaatcttagcttacggtgatgatttgattgtttcttatccttatgaactggatccgcaagtgttggcaactcttggtaaaaattatggactaaccatcacacccccagacaaatctgaaacttttacaaaaatgacatgggaaaacttgacatttttaaagagatacttcaagcctgatcaacaatttccctttttggttcacccagttatgcccatgaaagatatacatgagtcaatcagatggacaaaggatcctaaaaacacacaggatcacgtccgatcattatgcatgttagcatggcactcaggagaaaaagagtacaatgaattcattcagaagatcagaactactgacattggaaaatgtctaattctcccagaatacagcgtacttaggaggcgctggttggacctcttttaggttaacaatatagacacttaatttgagtagaagtaggagtttataaaaaaaaaaa

SEQ ID NO: 78 - DNA, 5557 bp, Artificial Sequence
  Synthetic sequence
ttaaaacagcggatgggtatcccaccattcgacccattgggtgtagtactctggtactatgtacctttgtacgcctgtttctccccaaccacccttccttaaaattcccacccatgaaacgttagaagcttgacattaaagtacaataggtggcgccatatccaatggtgtctatgtacaagcacttctgtttccccggagcgaggtataggctgtacccactgccaaaagcctttaaccgttatccgccaaccaactacgtaacagttagtaccatcttgttcttgactggacgttcgatcaggtggattttccctccactagtttggtcgatgaggctaggaattccccacgggtgaccgtgtcctagcctgcgtggcggccaacccagcttatgctgggacgcccttttaaggacatggtgtgaagactcgcatgtgcttggttgtgagtcctccggcccctgaatgcggctaaccttaaccctggagccttatgccacgatccagtggttgtaaggtcgtaatgagcaattccgggacgggaccgactactttgggtgtccgtgtttctcatttttcttcatattgtcttatggtcacagcatatatatacatatactgtgatcatgggcgctcaggtttctacacagaaaagtggatctcacgaaaatcaaaacattttgaccaatggatcaaatcagactttcacagttataaattactataaggatgcagcaagtacatcatcagctggtcaatcactgtcaatggacccatctaagtttacagaaccagttaaagatctcatgcttaagggtgcaccagcattgaattcacccaatgttgaggcctgtggttatagtgatagagtacaacaaatcacactcgggaattcaacaataacaacacaagaagcagccaacgctgttgtgtgttatgctgaatggccagagtaccttccagatgtggacgctagtgatgtcaataaaacttcaaaaccagacacttctgtctgtaggttttacacattggatagtaagacatggacaacaggttctaaaaagcttaggctgatgaaagatactcaaactatctcacagactgttgcactcactgaaggcttaggtgatgaattagaagaagtcatcgttgagaaaacgaaacagacggtggcctcaatctcatctggtccaaaacacacacaaaaagtccccatactaactgcaaacgaaacaggggccacaatgcctgttcttccatcagacagcatagaaaccagaactacctacatgcactttaatggttcagaaactgatgtagaatgctttttgggtcgtgcagcttgtgtgcatgtaactgaaatacaaaacaaagatgctactggaatagataatcacagagaagcaaaattgttcaatgattggaaaatcaacctgtccagccttgtccaacttagaaagaaactagaactcttcacttatatacagaaccagtaattaagaagaggaaaggtgacattaaatcctatggtttaggacctaggtacggtgggatttatacatcaaatgttaaaataatgaattaccacttgatgacaccagaagaccaccataatctgatagcaccctatccaaatagagatttagcaatagtctcaacaggaggacatggtgcagaaacaataccacactgtaactgtacatcaggtgtttactattccacatattacagaaagtattaccccataatttgtgaaaagcccaccaacatctggattgaaggaaacccttattacccaagtagatttcaagcaggagtgatgaaaggggttgggccagcagaaccaggagactgcggtgggattttgagatgcatacatggtcccattggattgttaacagctggaggtagtggatatgtttgttttgctgacatacgacagttggagtgtatcgcagaggaacaggggctgagtgattacatcacaggtttgggtagagcttttggtgtcgggttcactgaccaaatctcaacaaaagtcacagaactacaagaagtggcgaaagatttcctcaccacaaaagttttgtccaaagtggtcaaaatggtttcagctttagtgatcatttgcagaaatcatgatgacttggtcactgttacggccactctagcactacttggatgtgatggatctccctggagatttctgaagatgtacatttccaaacactttcaggtgccttacattgaaagacaagcaaatgatggatggttcagaaagtttaatgatgcatgtaatgctgcaaagggattggaatggattgctaataagatttccaaactgattgaatggataaaaaacaaagtacttccccaagccaaagaaaaactagaattttgtagtaaactcaaacaacttgatatactagagagacaaataaccaccatgcatatctcgaatccaacacaggaaaaacgagagcagttgttcaacaacgtattgtggttggaacaaatgtcgcaaaagtttgccccacattatgccgttgaatcaaaaagaatcagggaactcaagaacaaaatggtaaattatatgcaatttaaaagtaaacaaagaactgaaccagtgtgtgtattaatccatggtacacccggttctggtaaatcattaacaacatccattgtgggacgtgcaattgcagaacacttcaattcagcagtatattcacttccaccagatcccaagcactttgatggttatcagcaacaggaagttgtgattatggatgatctgaaccaaaatccagacggacaggatataagcatgttttgtcaaatggtttcttcagtggatttcttgcctccaatggctagtttagataacaagggcatgttattcaccagtaattttgttctagcctccacaaattctaacacactaagccccccaacaatcttgaatcctgaagctttagtcaggagatttggttttgacctggatatatgtttgcatactacctacacaaagaatggaaaactcaatgcaggcatgtcaaccaagacatgcaaagattgccatcaaccatctaatttcaagaaatgttgccccctggtctgtggaaaagctattagcttggtagacagaactaccaacgttaggtatagtgtggatcaactggtcacagctattataagtgatttcaagagcaaaatgcaaattacagattccctagaaacactgtttcaaggaccagtgtataaagatttagagattgatgtttgcaacacaccacctccagaatgtatcaacgatttactgaaatctgtagattcagaagagattagggaatattgtaagaagaagaaatggattatacctgaaattcctaccaacatagaaagagctatgaatcaagccagcatgattattaatactattctgatgtttgtcagtacattaggtattgtttatgtcatttataaattgtttgctcaaactcaaggaccatattctggtaacccgcctcacaataaactaaaagccccaactttacgcccagttgttgtgcaaggaccaaacacagaatttgcactatccctgttaaggaaaaacataatgactataacaacctcaaagggagagttcacagggttaggcatacatgatcgtgtctgtgtgatacccacacacgcacagcctggtgatgatgtactagtgaatggtcagaaaattagagttaaggataagtacaaattagtagatccagagaacattaatctagagcttacagtgttgactttagatagaaatgaaaaattcagagatatcaggggatttatatcagaagatctagaaggtgtggatgccactttggtagtacattcaaataactttaccaacactatcttagaagttggccctgtaacaatggcaggacttattaatttgagtagcacccccactaacagaatgattcgttatgattatgcaacaaaaactgggcagtgtggaggtgtgctgtgtgctactggtaagatctttggtattcatgttggcggtaatggaagacaaggattttcagctcaacttaaaaaacaatattttgtagagaaacaaggccaagtaatagctagacataaggttagggagtttaacataaatccagtcaacacgccaaccaagtcaaaattacatcccagtgtattctatgatgttttcccaggtgacaaggaacctgctgtattgagtgacaatgatcccagactggaagttaaattgactgaatcattattctctaagtacaaggggaatgtaaatacggaacccactgaaaatatgcttgtggctgtagaccattatgcagggcaactattatcactagatatccccacttctgaacttacactaaaagaagcattatatggagtagatggactagaacctatagatattacaaccagtgcaggatttccctatgtgagtcttgggatcaaaaagagagacattctgaataaagagacccaggacacagaaaagatgaagttttatctagacaagtatggcattgacttgcctctagttacatatattaaggatgaattaagaagtgttgacaaagtccgattagggaaaagtagattaattgaagcctccagtttgaatgattctgttaacatgagaatgaaactaggcaacctttacaaagcattccatcaaaatcccggtgttctgactggatcagcagtgggttgtgatcctgatgtgttttggtctgtcatcccttgcttaatggatgggcacctgatggcatttgattactctaattttgatgcctctttgtcaccagtttggtttgtctgtctagagaaggttttgaccaagttaggctttgcaggctcttcattaattcaatcaatttgtaatacccatcatatctttagggatgaaatatatgtggttgaaggtggcatgccctcagggtgttcaggaaccagcatattcaattccatgatcaacaacataatcattaggactttgatattagatgcatataaaggaatagatttagacaaacttaaaatcttagcttacggtgatgatttgattgtttcttatccttatgaactggatccgcaagtgttggcaactcttggtaaaaattatggactaaccatcacacccccagacaaatctgaaacttttacaaaaatgacatgggaaaacttgacatttttaaagagatacttcaagcctgatcaacaatttccctttttggttcacccagttatgcccatgaaagatatacatgagtcaatcagatggacaaaggatcctaaaaacacacaggatcacgtccgatcattatgcatgttagcatggcactcaggagaaaaagagtacaatgaattcattcagaagatcagaactactgacattggaaaatgtctaattctcccagaatacagcgtacttaggaggcgctggttggacctcttttaggttaacaatatagacacttaatttgagtagaagtaggagtttataaaaaaaaaaa

SEQ ID NO: 79 - DNA, 7148 bp, Artificial Sequence
  Synthetic sequence
ttaaaacagcggatgggtatcccaccattcgacccattgggtgtagtactctggtactatgtacctttgtacgcctgtttctccccaaccacccttccttaaaattcccacccatgaaacgttagaagcttgacattaaagtacaataggtggcgccatatccaatggtgtctatgtacaagcacttctgtttccccggagcgaggtataggctgtacccactgccaaaagcctttaaccgttatccgccaaccaactacgtaacagttagtaccatcttgttcttgactggacgttcgatcaggtggattttccctccactagtttggtcgatgaggctaggaattccccacgggtgaccgtgtcctagcctgcgtggcggccaacccagcttatgctgggacgcccttttaaggacatggtgtgaagactcgcatgtgcttggttgtgagtcctccggcccctgaatgcggctaaccttaaccctggagccttatgccacgatccagtggttgtaaggtcgtaatgagcaattccgggacgggaccgactactttgggtgtccgtgtttctcatttttcttcatattgtcttatggtcacagcatatatatacatatactgtgatcatgggcgctcaggtttctacacagaaaagtggatctcacgaaaatcaaaacattttgaccaatggatcaaatcagactttcacagttataaattactataaggatgcagcaagtacatcatcagctggtcaatcactgtcaatggacccatctaagtttacagaaccagttaaagatctcatgcttaagggtgcaccagcattgaattcacccaatgttgaggcctgtggttatagtgatagagtacaacaaatcacactcgggaattcaacaataacaacacaagaagcagccaacgctgttgtgtgttatgctgaatggccagagtaccttccagatgtggacgctagtgatgtcaataaaacttcaaaaccagacacttctgtctgtaggttttacacattggatagtaagacatggacaacaggttctaaaggctggtgctggaaattaccagatgcactcaaagatatgggtgtgttcgggcaaaacatgtttttccactcactaggaagatcaggttacacagtacacgttcagtgcaatgccacaaaattccatagcggttgtctacttgtagttgtaataccagaacaccaactggcttcacatgagggtggcaatgtttcagttaaatacacattcacgcatccaggtgaacgtggtatagatttatcatctgcaaatgaagtgggagggcctgtcaaggatgtcatatacaatatgaatggtactttattaggaaatctgctcattttccctcaccagttcattaatctaagaaccaataatacagccacaatagtgataccatacataaactcagtacccattgattcaatgacacgtcacaacaatgtctcactgatggtcatccctattgcccctcttacagtaccaactggagcaactccctcactccctataacagtcacaatagcacctatgtgcactgagttctctgggataaggtccaagtcaattgtgccacaaggtttgccaactacaactttgccggggtcaggacaattcttgaccacagatgacaggcaatcccccagtgcactgccaaattatgagccaactccaagaatacacataccagggaaagttcataacttgctagaaattatacaggtagatacactcattcctatgaacaacacgcatacaaaagatgaggttaacagttacctcataccactaaatgcaaacaggcaaaatgagcaggtttttgggacaaacctgtttattggtgatggggtcttcaaaactactcttctgggtgaaattgttcagtactatacacattggtctggatcacttagattctctttgatgtatactggtcctgccttgtccagtgctaaactcattctagcatacaccccgcctggtgctcgtggtccacaggacaggagagaagcaatgctaggtactcatgttgtctgggatattggtctgcaatccaccatagtaatgacaataccatggacatcaggggtgcagtttagatatactgatccagatacatacaccagtgctggctttctatcatgttggtatcaaacttctcttatacttcccccagaaacgaccggccaggtctacttattatcattcataagtgcatgtccagattttaagcttaggctgatgaaagatactcaaactatctcacagactgttgcactcactgaaggcttaggtgatgaattagaagaagtcatcgttgagaaaacgaaacagacggtggcctcaatctcatctggtccaaaacacacacaaaaagtccccatactaactgcaaacgaaacaggggccacaatgcctgttcttccatcagacagcatagaaaccagaactacctacatgcactttaatggttcagaaactgatgtagaatgctttttgggtcgtgcagcttgtgtgcatgtaactgaaatacaaaacaaagatgctactggaatagataatcacagagaagcaaaattgttcaatgattggaaaatcaacctgtccagccttgtccaacttagaaagaaactagaactcttcacttatgttaggtttgattctgagtataccatactggccactgcatctcaacctgattcagcaaactattcaagcaatttggtggtccaagccatgtatgttccacctggtgccccgaatccaaaagagtgggacgattacacatggcaaagtgcttcaaaccccagtgtattcttcaaggtgggggatacatccaggtttagtgtgccttatgtaggattggcatcagcatataattgtttttatgatggttactcacatgatgatgcagaaactcagtatggcataactgttctaaaccatatgggtagtatggcattcagaatagtaaatgaacatgatgaacataaaactcttgtcaagatcagagtttatcacagggcaaagcacgttgaagcatggattccaagagcacccagagcactaccctacacatcaatagggcgcacaaattatcctaagaatacagaaccagtaattaagaagaggaaacacttgatgacaccagaagaccaccataatctgatagcaccctatccaaatagagatttagcaatagtctcaacaggaggacatggtgcagaaacaataccacactgtaactgtacatcaggtgtttactattccacatattacagaaagtattaccccataatttgtgaaaagcccaccaacatctggattgaaggaaacccttattacccaagtagatttcaagcaggagtgatgaaaggggttgggccagcagaaccaggagactgcggtgggattttgagatgcatacatggtcccattggattgttaacagctggaggtagtggatatgtttgttttgctgacatacgacagttggagtgtatcgcagaggaacaggggctgagtgattacatcacaggtttgggtagagcttttggtgtcgggttcactgaccaaatctcaacaaaagtcacagaactacaagaagtggcgaaagatttcctcaccacaaaagttttgtccaaagtggtcaaaatggtttcagctttagtgatcatttgcagaaatcatgatgacttggtcactgttacggccactctagcactacttggatgtgatggatctccctggagatttctgaagatgtacatttccaaacactttcaggtgccttacattgaaagacaagcaaatgatggatggttcagaaagtttaatgatgcatgtaatgctgcaaagggattggaatggattgctaataagatttccaaactgattgaatggataaaaaacaaagtacttccccaagccaaagaaaaactagaattttgtagtaaactcaaacaacttgatatactagagagacaaataaccaccatgcatatctcgaatccaacacaggaaaaacgagagcagttgttcaacaacgtattgtggttggaacaaatgtcgcaaaagtttgccccacattatgccgttgaatcaaaaagaatcagggaactcaagaacaaaatggtaaattatatgcaatttaaaagtaaacaaagaactgaaccagtgtgtgtattaatccatggtacacccggttctggtaaatcattaacaacatccattgtgggacgtgcaattgcagaacacttcaattcagcagtatattcacttccaccagatcccaagcactttgatggttatcagcaacaggaagttgtgattatggatgatctgaaccaaaatccagacggacaggatataagcatgttttgtcaaatggtttcttcagtggatttcttgcctccaatggctagtttagataacaagggcatgttattcaccagtaattttgttctagcctccacaaattctaacacactaagccccccaacaatcttgaatcctgaagctttagtcaggagatttggttttgacctggatatatgtttgcatactacctacacaaagaatggaaaactcaatgcaggcatgtcaaccaagacatgcaaagattgccatcaaccatctaatttcaagaaatgttgccccctggtctgtggaaaagctattagcttggtagacagaactaccaacgttaggtatagtgtggatcaactggtcacagctattataagtgatttcaagagcaaaatgcaaattacagattccctagaaacactgtttcaaggaccagtgtataaagatttagagattgatgtttgcaacacaccacctccagaatgtatcaacgatttactgaaatctgtagattcagaagagattagggaatattgtaagaagaagaaatggattatacctgaaattcctaccaacatagaaagagctatgaatcaagccagcatgattattaatactattctgatgtttgtcagtacattaggtattgtttatgtcatttataaattgtttgctcaaactcaaggaccatattctggtaacccgcctcacaataaactaaaagccccaactttacgcccagttgttgtgcaaggaccaaacacagaatttgcactatccctgttaaggaaaaacataatgactataacaacctcaaagggagagttcacagggttaggcatacatgatcgtgtctgtgtgatacccacacacgcacagcctggtgatgatgtactagtgaatggtcagaaaattagagttaaggataagtacaaattagtagatccagagaacattaatctagagcttacagtgttgactttagatagaaatgaaaaattcagagatatcaggggatttatatcagaagatctagaaggtgtggatgccactttggtagtacattcaaataactttaccaacactatcttagaagttggccctgtaacaatggcaggacttattaatttgagtagcacccccactaacagaatgattcgttatgattatgcaacaaaaactgggcagtgtggaggtgtgctgtgtgctactggtaagatctttggtattcatgttggcggtaatggaagacaaggattttcagctcaacttaaaaaacaatattttgtagagaaacaaggccaagtaatagctagacataaggttagggagtttaacataaatccagtcaacacgccaaccaagtcaaaattacatcccagtgtattctatgatgttttcccaggtgacaaggaacctgctgtattgagtgacaatgatcccagactggaagttaaattgactgaatcattattctctaagtacaaggggaatgtaaatacggaacccactgaaaatatgcttgtggctgtagaccattatgcagggcaactattatcactagatatccccacttctgaacttacactaaaagaagcattatatggagtagatggactagaacctatagatattacaaccagtgcaggatttccctatgtgagtcttgggatcaaaaagagagacattctgaataaagagacccaggacacagaaaagatgaagttttatctagacaagtatggcattgacttgcctctagttacatatattaaggatgaattaagaagtgttgacaaagtccgattagggaaaagtagattaattgaagcctccagtttgaatgattctgttaacatgagaatgaaactaggcaacctttacaaagcattccatcaaaatcccggtgttctgactggatcagcagtgggttgtgatcctgatgtgttttggtctgtcatcccttgcttaatggatgggcacctgatggcatttgattactctaattttgatgcctctttgtcaccagtttggtttgtctgtctagagaaggttttgaccaagttaggctttgcaggctcttcattaattcaatcaatttgtaatacccatcatatctttagggatgaaatatatgtggttgaaggtggcatgccctcagggtgttcaggaaccagcatattcaattccatgatcaacaacataatcattaggactttgatattagatgcatataaaggaatagatttagacaaacttaaaatcttagcttacggtgatgatttgattgtttcttatccttatgaactggatccgcaagtgttggcaactcttggtaaaaattatggactaaccatcacacccccagacaaatctgaaacttttacaaaaatgacatgggaaaacttgacatttttaaagagatacttcaagcctgatcaacaatttccctttttggttcacccagttatgcccatgaaagatatacatgagtcaatcagatggacaaaggatcctaaaaacacacaggatcacgtccgatcattatgcatgttagcatggcactcaggagaaaaagagtacaatgaattcattcagaagatcagaactactgacattggaaaatgtctaattctcccagaatacagcgtacttaggaggcgctggttggacctcttttaggttaacaatatagacacttaatttgagtagaagtaggagtttataaaaaaaaaaa

SEQ ID NO: 80 - DNA, 7171 bp, Artificial Sequence
  Synthetic sequence
ttaaaacagcggatgggtatcccaccattcgacccattgggtgtagtactctggtactatgtacctttgtacgcctgtttctccccaaccacccttccttaaaattcccacccatgaaacgttagaagcttgacattaaagtacaataggtggcgccatatccaatggtgtctatgtacaagcacttctgtttccccggagcgaggtataggctgtacccactgccaaaagcctttaaccgttatccgccaaccaactacgtaacagttagtaccatcttgttcttgactggacgttcgatcaggtggattttccctccactagtttggtcgatgaggctaggaattccccacgggtgaccgtgtcctagcctgcgtggcggccaacccagcttatgctgggacgcccttttaaggacatggtgtgaagactcgcatgtgcttggttgtgagtcctccggcccctgaatgcggctaaccttaaccctggagccttatgccacgatccagtggttgtaaggtcgtaatgagcaattccgggacgggaccgactactttgggtgtccgtgtttctcatttttcttcatattgtcttatggtcacagcatatatatacatatactgtgatcatgggcgctcaggtttctacacagaaaagtggatctcacgaaaatcaaaacattttgaccaatggatcaaatcagactttcacagttataaattactataaggatgcagcaagtacatcatcagctggtcaatcactgtcaatggacccatctaagtttacagaaccagttaaagatctcatgcttaagggtgcaccagcattgaattcacccaatgttgaggcctgtggttatagtgatagagtacaacaaatcacactcgggaattcaacaataacaacacaagaagcagccaacgctgttgtgtgttatgctgaatggccagagtaccttccagatgtggacgctagtgatgtcaataaaacttcaaaaccagacacttctgtctgtaggttttacacattggatagtaagacatggacaacaggttctaaaggctggtgctggaaattaccagatgcactcaaagatatgggtgtgttcgggcaaaacatgtttttccactcactaggaagatcaggttacacagtacacgttcagtgcaatgccacaaaattccatagcggttgtctacttgtagttgtaataccagaacaccaactggcttcacatgagggtggcaatgtttcagttaaatacacattcacgcatccaggtgaacgtggtatagatttatcatctgcaaatgaagtgggagggcctgtcaaggatgtcatatacaatatgaatggtactttattaggaaatctgctcattttccctcaccagttcattaatctaagaaccaataatacagccacaatagtgataccatacataaactcagtacccattgattcaatgacacgtcacaacaatgtctcactgatggtcatccctattgcccctcttacagtaccaactggagcaactccctcactccctataacagtcacaatagcacctatgtgcactgagttctctgggataaggtccaagtcaattgtgccacaaggtttgccaactacaactttgccggggtcaggacaattcttgaccacagatgacaggcaatcccccagtgcactgccaaattatgagccaactccaagaatacacataccagggaaagttcataacttgctagaaattatacaggtagatacactcattcctatgaacaacacgcatacaaaagatgaggttaacagttacctcataccactaaatgcaaacaggcaaaatgagcaggtttttgggacaaacctgtttattggtgatggggtcttcaaaactactcttctgggtgaaattgttcagtactatacacattggtctggatcacttagattctctttgatgtatactggtcctgccttgtccagtgctaaactcattctagcatacaccccgcctggtgctcgtggtccacaggacaggagagaagcaatgctaggtactcatgttgtctgggatattggtctgcaatccaccatagtaatgacaataccatggacatcaggggtgcagtttagatatactgatccagatacatacaccagtgctggctttctatcatgttggtatcaaacttctcttatacttcccccagaaacgaccggccaggtctacttattatcattcataagtgcatgtccagattttaagcttaggctgatgaaagatactcaaactatctcacagactgttgcactcactgaaggcttaggtgatgaattagaagaagtcatcgttgagaaaacgaaacagacggtggcctcaatctcatctggtccaaaacacacacaaaaagtccccatactaactgcaaacgaaacaggggccacaatgcctgttcttccatcagacagcatagaaaccagaactacctacatgcactttaatggttcagaaactgatgtagaatgctttttgggtcgtgcagcttgtgtgcatgtaactgaaatacaaaacaaagatgctactggaatagataatcacagagaagcaaaattgttcaatgattggaaaatcaacctgtccagccttgtccaacttagaaagaaactagaactcttcacttatgttaggtttgattctgagtataccatactggccactgcatctcaacctgattcagcaaactattcaagcaatttggtggtccaagccatgtatgttccacctggtgccccgaatccaaaagagtgggacgattacacatggcaaagtgcttcaaaccccagtgtattcttcaaggtgggggatacatccaggtttagtgtgccttatgtaggattggcatcagcatataattgtttttatgatggttactcacatgatgatgcagaaactcagtatggcataactgttctaaaccatatgggtagtatggcattcagaatagtaaatgaacatgatgaacataaaactcttgtcaagatcagagtttatcacagggcaaagcacgttgaagcatggattccaagagcacccagagcactaccctacacatcaatagggcgcacaaattatcctaagaatacagaaccagtaattaagaagaggaaaggtgacattaaatcctatggtttaggacctaggtacggtgggatttatacatcaaatgttaaaataatgaattaccacttgatgacaccagaagaccaccataatctgatagcaccctatccaaatagagatttagcaatagtctcaacaggaggacatggtgcagaaacaataccacactgtaactgtacatcaggtgtttactattccacatattacagaaagtattaccccataatttgtgaaaagcccaccaacatctggattgaaggaaacccttattaccagactgcggtgggattttgagatgcatacatggtcccattggattgttaacagctggaggtagtggatatgtttgttttgctgacatacgacagttggagtgtatcgcagaggaacaggggctgagtgattacatcacaggtttgggtagagcttttggtgtcgggttcactgaccaaatctcaacaaaagtcacagaactacaagaagtggcgaaagatttcctcaccacaaaagttttgtccaaagtggtcaaaatggtttcagctttagtgatcatttgcagaaatcatgatgacttggtcactgttacggccactctagcactacttggatgtgatggatctccctggagatttctgaagatgtacatttccaaacactttcaggtgccttacattgaaagacaagcaaatgatggatggttcagaaagtttaatgatgcatgtaatgctgcaaagggattggaatggattgctaataagatttccaaactgattgaatggataaaaaacaaagtacttccccaagccaaagaaaaactagaattttgtagtaaactcaaacaacttgatatactagagagacaaataaccaccatgcatatctcgaatccaacacaggaaaaacgagagcagttgttcaacaacgtattgtggttggaacaaatgtcgcaaaagtttgccccacattatgccgttgaatcaaaaagaatcagggaactcaagaacaaaatggtaaattatatgcaatttaaaagtaaacaaagaactgaaccagtgtgtgtattaatccatggtacacccggttctggtaaatcattaacaacatccattgtgggacgtgcaattgcagaacacttcaattcagcagtatattcacttccaccagatcccaagcactttgatggttatcagcaacaggaagttgtgattatggatgatctgaaccaaaatccagacggacaggatataagcatgttttgtcaaatggtttcttcagtggatttcttgcctccaatggctagtttagataacaagggcatgttattcaccagtaattttgttctagcctccacaaattctaacacactaagccccccaacaatcttgaatcctgaagctttagtcaggagatttggttttgacctggatatatgtttgcatactacctacacaaagaatggaaaactcaatgcaggcatgtcaaccaagacatgcaaagattgccatcaaccatctaatttcaagaaatgttgccccctggtctgtggaaaagctattagcttggtagacagaactaccaacgttaggtatagtgtggatcaactggtcacagctattataagtgatttcaagagcaaaatgcaaattacagattccctagaaacactgtttcaaggaccagtgtataaagatttagagattgatgtttgcaacacaccacctccagaatgtatcaacgatttactgaaatctgtagattcagaagagattagggaatattgtaagaagaagaaatggattatacctgaaattcctaccaacatagaaagagctatgaatcaagccagcatgattattaatactattctgatgtttgtcagtacattaggtattgtttatgtcatttataaattgtttgctcaaactcaaggaccatattctggtaacccgcctcacaataaactaaaagccccaactttacgcccagttgttgtgcaaggaccaaacacagaatttgcactatccctgttaaggaaaaacataatgactataacaacctcaaagggagagttcacagggttaggcatacatgatcgtgtctgtgtgatacccacacacgcacagcctggtgatgatgtactagtgaatggtcagaaaattagagttaaggataagtacaaattagtagatccagagaacattaatctagagcttacagtgttgactttagatagaaatgaaaaattcagagatatcaggggatttatatcagaagatctagaaggtgtggatgccactttggtagtacattcaaataactttaccaacactatcttagaagttggccctgtaacaatggcaggacttattaatttgagtagcacccccactaacagaatgattcgttatgattatgcaacaaaaactgggcagtgtggaggtgtgctgtgtgctactggtaagatctttggtattcatgttggcggtaatggaagacaaggattttcagctcaacttaaaaaacaatattttgtagagaaacaaggccaagtaatagctagacataaggttagggagtttaacataaatccagtcaacacgccaaccaagtcaaaattacatcccagtgtattctatgatgttttcccaggtgacaaggaacctgctgtattgagtgacaatgatcccagactggaagttaaattgactgaatcattattctctaagtacaaggggaatgtaaatacggaacccactgaaaatatgcttgtggctgtagaccattatgcagggcaactattatcactagatatccccacttctgaacttacactaaaagaagcattatatggagtagatggactagaacctatagatattacaaccagtgcaggatttccctatgtgagtcttgggatcaaaaagagagacattctgaataaagagacccaggacacagaaaagatgaagttttatctagacaagtatggcattgacttgcctctagttacatatattaaggatgaattaagaagtgttgacaaagtccgattagggaaaagtagattaattgaagcctccagtttgaatgattctgttaacatgagaatgaaactaggcaacctttacaaagcattccatcaaaatcccggtgttctgactggatcagcagtgggttgtgatcctgatgtgttttggtctgtcatcccttgcttaatggatgggcacctgatggcatttgattactctaattttgatgcctctttgtcaccagtttggtttgtctgtctagagaaggttttgaccaagttaggctttgcaggctcttcattaattcaatcaatttgtaatacccatcatatctttagggatgaaatatatgtggttgaaggtggcatgccctcagggtgttcaggaaccagcatattcaattccatgatcaacaacataatcattaggactttgatattagatgcatataaaggaatagatttagacaaacttaaaatcttagcttacggtgatgatttgattgtttcttatccttatgaactggatccgcaagtgttggcaactcttggtaaaaattatggactaaccatcacacccccagacaaatctgaaacttttacaaaaatgacatgggaaaacttgacatttttaaagagatacttcaagcctgatcaacaatttccctttttggttcacccagttatgcccatgaaagatatacatgagtcaatcagatggacaaaggatcctaaaaacacacaggatcacgtccgatcattatgcatgttagcatggcactcaggagaaaaagagtacaatgaattcattcagaagatcagaactactgacattggaaaatgtctaattctcccagaatacagcgtacttaggaggcgctggttggacctcttttaggttaacaatatagacacttaatttgagtagaagtaggagtttataaaaaaaaaaa

SEQ ID NO: 81 - DNA, 7165 bp, Artificial Sequence
  Synthetic sequence
ttaaaacagcggatgggtatcccaccattcgacccattgggtgtagtactctggtactatgtacctttgtacgcctgtttctccccaaccacccttccttaaaattcccacccatgaaacgttagaagcttgacattaaagtacaataggtggcgccatatccaatggtgtctatgtacaagcacttctgtttccccggagcgaggtataggctgtacccactgccaaaagcctttaaccgttatccgccaaccaactacgtaacagttagtaccatcttgttcttgactggacgttcgatcaggtggattttccctccactagtttggtcgatgaggctaggaattccccacgggtgaccgtgtcctagcctgcgtggcggccaacccagcttatgctgggacgcccttttaaggacatggtgtgaagactcgcatgtgcttggttgtgagtcctccggcccctgaatgcggctaaccttaaccctggagccttatgccacgatccagtggttgtaaggtcgtaatgagcaattccgggacgggaccgactactttgggtgtccgtgtttctcatttttcttcatattgtcttatggtcacagcatatatatacatatactgtgatcatgggcgctcaggtttctacacagaaaagtggatctcacgaaaatcaaaacattttgaccaatggatcaaatcagactttcacagttataaattactataaggatgcagcaagtacatcatcagctggtcaatcactgtcaatggacccatctaagtttacagaaccagttaaagatctcatgcttaagggtgcaccagcattgaattcacccaatgttgaggcctgtggttatagtgatagagtacaacaaatcacactcgggaattcaacaataacaacacaagaagcagccaacgctgttgtgtgttatgctgaatggccagagtaccttccagatgtggacgctagtgatgtcaataaaacttcaaaaccagacacttctgtctgtaggttttacacattggatagtaagacatggacaacaggttctaaaggctggtgctggaaattaccagatgcactcaaagatatgggtgtgttcgggcaaaacatgtttttccactcactaggaagatcaggttacacagtacacgttcagtgcaatgccacaaaattccatagcggttgtctacttgtagttgtaataccagaacaccaactggcttcacatgagggtggcaatgtttcagttaaatacacattcacgcatccaggtgaacgtggtatagatttatcatctgcaaatgaagtgggagggcctgtcaaggatgtcatatacaatatgaatggtactttattaggaaatctgctcattttccctcaccagttcattaatctaagaaccaataatacagccacaatagtgataccatacataaactcagtacccattgattcaatgacacgtcacaacaatgtctcactgatggtcatccctattgcccctcttacagtaccaactggagcaactccctcactccctataacagtcacaatagcacctatgtgcactgagttctctgggataaggtccaagtcaattgtgccacaaggtttgccaactacaactttgccggggtcaggacaattcttgaccacagatgacaggcaatcccccagtgcactgccaaattatgagccaactccaagaatacacataccagggaaagttcataacttgctagaaattatacaggtagatacactcattcctatgaacaacacgcatacaaaagatgaggttaacagttacctcataccactaaatgcaaacaggcaaaatgagcaggtttttgggacaaacctgtttattggtgatggggtcttcaaaactactcttctgggtgaaattgttcagtactatacacattggtctggatcacttagattctctttgatgtatactggtcctgccttgtccagtgctaaactcattctagcatacaccccgcctggtgctcgtggtccacaggacaggagagaagcaatgctaggtactcatgttgtctgggatattggtctgcaatccaccatagtaatgacaataccatggacatcaggggtgcagtttagatatactgatccagatacatacaccagtgctggctttctatcatgttggtatcaaacttctcttatacttcccccagaaacgaccggccaggtctacttattatcattcataagtgcatgtccagattttaagcttaggctgatgaaagatactcaaactatctcacagactgttgcactcactgaaggcttaggtgatgaattagaagaagtcatcgttgagaaaacgaaacagacggtggcctcaatctcatctggtccaaaacacacacaaaaagtccccatactaactgcaaacgaaacaggggccacaatgcctgttcttccatcagacagcatagaaaccagaactacctacatgcactttaatggttcagaaactgatgtagaatgctttttgggtcgtgcagcttgtgtgcatgtaactgaaatacaaaacaaagatgctactggaatagataatcacagagaagcaaaattgttcaatgattggaaaatcaacctgtccagccttgtccaacttagaaagaaactagaactcttcacttatgttaggtttgattctgagtataccatactggccactgcatctcaacctgattcagcaaactattcaagcaatttggtggtccaagccatgtatgttccacctggtgccccgaatccaaaagagtgggacgattacacatggcaaagtgcttcaaaccccagtgtattcttcaaggtgggggatacatccaggtttagtgtgccttatgtaggattggcatcagcatataattgtttttatgatggttactcacatgatgatgcagaaactcagtatggcataactgttctaaaccatatgggtagtatggcattcagaatagtaaatgaacatgatgaacataaaactcttgtcaagatcagagtttatcacagggcaaagcacgttgaagcatggattccaagagcacccagagcactaccctacacatcaatagggcgcacaaattatcctaagaatacagaaccagtaattaagaagaggaaaggtgacattaaatcctatggtttaggacctaggtacggtgggatttatacatcaaatgttaaaataatgaattaccacttgatgacaccagaagaccaccataatctgatagcaccctatccaaatagagatttagcaatagtctcaacaggaggacatggtgcagaaacaataccacactgtaactgtacatcaggtgtttactattccacatattacagaaagtattaccccataatttgtgaaaagcccaccaacatctggattgaaggaaacccttattacccaagtagatttcaagcaggagtgatgaaaggggttgggccagcagaaccaggagactgcggtgggattttgagatgcatacatggtcccattggattgttaacagctggaggtagtggatatgtttgttttgctgacatacgacagttggagtgtatcgcagaggaacaggggctgagtgattacatcacaggtttgggtagagcttttggtgtcgggttcactgaccaaatctcaacaaaagtcacagaactacaagaagtggcgaaagatttcctcaccacaaaagttttgtccaaagtggtcaaaatggtttcagctttagtgatcatttgcagaaatcatgaagatttctgaagatgtacatttccaaacactttcaggtgccttacattgaaagacaagcaaatgatggatggttcagaaagtttaatgatgcatgtaatgctgcaaagggattggaatggattgctaataagatttccaaactgattgaatggataaaaaacaaagtacttccccaagccaaagaaaaactagaattttgtagtaaactcaaacaacttgatatactagagagacaaataaccaccatgcatatctcgaatccaacacaggaaaaacgagagcagttgttcaacaacgtattgtggttggaacaaatgtcgcaaaagtttgccccacattatgccgttgaatcaaaaagaatcagggaactcaagaacaaaatggtaaattatatgcaatttaaaagtaaacaaagaactgaaccagtgtgtgtattaatccatggtacacccggttctggtaaatcattaacaacatccattgtgggacgtgcaattgcagaacacttcaattcagcagtatattcacttccaccagatcccaagcactttgatggttatcagcaacaggaagttgtgattatggatgatctgaaccaaaatccagacggacaggatataagcatgttttgtcaaatggtttcttcagtggatttcttgcctccaatggctagtttagataacaagggcatgttattcaccagtaattttgttctagcctccacaaattctaacacactaagccccccaacaatcttgaatcctgaagctttagtcaggagatttggttttgacctggatatatgtttgcatactacctacacaaagaatggaaaactcaatgcaggcatgtcaaccaagacatgcaaagattgccatcaaccatctaatttcaagaaatgttgccccctggtctgtggaaaagctattagcttggtagacagaactaccaacgttaggtatagtgtggatcaactggtcacagctattataagtgatttcaagagcaaaatgcaaattacagattccctagaaacactgtttcaaggaccagtgtataaagatttagagattgatgtttgcaacacaccacctccagaatgtatcaacgatttactgaaatctgtagattcagaagagattagggaatattgtaagaagaagaaatggattatacctgaaattcctaccaacatagaaagagctatgaatcaagccagcatgattattaatactattctgatgtttgtcagtacattaggtattgtttatgtcatttataaattgtttgctcaaactcaaggaccatattctggtaacccgcctcacaataaactaaaagccccaactttacgcccagttgttgtgcaaggaccaaacacagaatttgcactatccctgttaaggaaaaacataatgactataacaacctcaaagggagagttcacagggttaggcatacatgatcgtgtctgtgtgatacccacacacgcacagcctggtgatgatgtactagtgaatggtcagaaaattagagttaaggataagtacaaattagtagatccagagaacattaatctagagcttacagtgttgactttagatagaaatgaaaaattcagagatatcaggggatttatatcagaagatctagaaggtgtggatgccactttggtagtacattcaaataactttaccaacactatcttagaagttggccctgtaacaatggcaggacttattaatttgagtagcacccccactaacagaatgattcgttatgattatgcaacaaaaactgggcagtgtggaggtgtgctgtgtgctactggtaagatctttggtattcatgttggcggtaatggaagacaaggattttcagctcaacttaaaaaacaatattttgtagagaaacaaggccaagtaatagctagacataaggttagggagtttaacataaatccagtcaacacgccaaccaagtcaaaattacatcccagtgtattctatgatgttttcccaggtgacaaggaacctgctgtattgagtgacaatgatcccagactggaagttaaattgactgaatcattattctctaagtacaaggggaatgtaaatacggaacccactgaaaatatgcttgtggctgtagaccattatgcagggcaactattatcactagatatccccacttctgaacttacactaaaagaagcattatatggagtagatggactagaacctatagatattacaaccagtgcaggatttccctatgtgagtcttgggatcaaaaagagagacattctgaataaagagacccaggacacagaaaagatgaagttttatctagacaagtatggcattgacttgcctctagttacatatattaaggatgaattaagaagtgttgacaaagtccgattagggaaaagtagattaattgaagcctccagtttgaatgattctgttaacatgagaatgaaactaggcaacctttacaaagcattccatcaaaatcccggtgttctgactggatcagcagtgggttgtgatcctgatgtgttttggtctgtcatcccttgcttaatggatgggcacctgatggcatttgattactctaattttgatgcctctttgtcaccagtttggtttgtctgtctagagaaggttttgaccaagttaggctttgcaggctcttcattaattcaatcaatttgtaatacccatcatatctttagggatgaaatatatgtggttgaaggtggcatgccctcagggtgttcaggaaccagcatattcaattccatgatcaacaacataatcattaggactttgatattagatgcatataaaggaatagatttagacaaacttaaaatcttagcttacggtgatgatttgattgtttcttatccttatgaactggatccgcaagtgttggcaactcttggtaaaaattatggactaaccatcacacccccagacaaatctgaaacttttacaaaaatgacatgggaaaacttgacatttttaaagagatacttcaagcctgatcaacaatttccctttttggttcacccagttatgcccatgaaagatatacatgagtcaatcagatggacaaaggatcctaaaaacacacaggatcacgtccgatcattatgcatgttagcatggcactcaggagaaaaagagtacaatgaattcattcagaagatcagaactactgacattggaaaatgtctaattctcccagaatacagcgtacttaggaggcgctggttggacctcttttaggttaacaatatagacacttaatttgagtagaagtaggagtttataaaaaaaaaaa

SEQ ID NO: 82 - DNA, 7181 bp, Artificial Sequence
  Synthetic sequence
ttaaaacagcggatgggtatcccaccattcgacccattgggtgtagtactctggtactatgtacctttgtacgcctgtttctccccaaccacccttccttaaaattcccacccatgaaacgttagaagcttgacattaaagtacaataggtggcgccatatccaatggtgtctatgtacaagcacttctgtttccccggagcgaggtataggctgtacccactgccaaaagcctttaaccgttatccgccaaccaactacgtaacagttagtaccatcttgttcttgactggacgttcgatcaggtggattttccctccactagtttggtcgatgaggctaggaattccccacgggtgaccgtgtcctagcctgcgtggcggccaacccagcttatgctgggacgcccttttaaggacatggtgtgaagactcgcatgtgcttggttgtgagtcctccggcccctgaatgcggctaaccttaaccctggagccttatgccacgatccagtggttgtaaggtcgtaatgagcaattccgggacgggaccgactactttgggtgtccgtgtttctcatttttcttcatattgtcttatggtcacagcatatatatacatatactgtgatcatgggcgctcaggtttctacacagaaaagtggatctcacgaaaatcaaaacattttgaccaatggatcaaatcagactttcacagttataaattactataaggatgcagcaagtacatcatcagctggtcaatcactgtcaatggacccatctaagtttacagaaccagttaaagatctcatgcttaagggtgcaccagcattgaattcacccaatgttgaggcctgtggttatagtgatagagtacaacaaatcacactcgggaattcaacaataacaacacaagaagcagccaacgctgttgtgtgttatgctgaatggccagagtaccttccagatgtggacgctagtgatgtcaataaaacttcaaaaccagacacttctgtctgtaggttttacacattggatagtaagacatggacaacaggttctaaaggctggtgctggaaattaccagatgcactcaaagatatgggtgtgttcgggcaaaacatgtttttccactcactaggaagatcaggttacacagtacacgttcagtgcaatgccacaaaattccatagcggttgtctacttgtagttgtaataccagaacaccaactggcttcacatgagggtggcaatgtttcagttaaatacacattcacgcatccaggtgaacgtggtatagatttatcatctgcaaatgaagtgggagggcctgtcaaggatgtcatatacaatatgaatggtactttattaggaaatctgctcattttccctcaccagttcattaatctaagaaccaataatacagccacaatagtgataccatacataaactcagtacccattgattcaatgacacgtcacaacaatgtctcactgatggtcatccctattgcccctcttacagtaccaactggagcaactccctcactccctataacagtcacaatagcacctatgtgcactgagttctctgggataaggtccaagtcaattgtgccacaaggtttgccaactacaactttgccggggtcaggacaattcttgaccacagatgacaggcaatcccccagtgcactgccaaattatgagccaactccaagaatacacataccagggaaagttcataacttgctagaaattatacaggtagatacactcattcctatgaacaacacgcatacaaaagatgaggttaacagttacctcataccactaaatgcaaacaggcaaaatgagcaggtttttgggacaaacctgtttattggtgatggggtcttcaaaactactcttctgggtgaaattgttcagtactatacacattggtctggatcacttagattctctttgatgtatactggtcctgccttgtccagtgctaaactcattctagcatacaccccgcctggtgctcgtggtccacaggacaggagagaagcaatgctaggtactcatgttgtctgggatattggtctgcaatccaccatagtaatgacaataccatggacatcaggggtgcagtttagatatactgatccagatacatacaccagtgctggctttctatcatgttggtatcaaacttctcttatacttcccccagaaacgaccggccaggtctacttattatcattcataagtgcatgtccagattttaagcttaggctgatgaaagatactcaaactatctcacagactgttgcactcactgaaggcttaggtgatgaattagaagaagtcatcgttgagaaaacgaaacagacggtggcctcaatctcatctggtccaaaacacacacaaaaagtccccatactaactgcaaacgaaacaggggccacaatgcctgttcttccatcagacagcatagaaaccagaactacctacatgcactttaatggttcagaaactgatgtagaatgctttttgggtcgtgcagcttgtgtgcatgtaactgaaatacaaaacaaagatgctactggaatagataatcacagagaagcaaaattgttcaatgattggaaaatcaacctgtccagccttgtccaacttagaaagaaactagaactcttcacttatgttaggtttgattctgagtataccatactggccactgcatctcaacctgattcagcaaactattcaagcaatttggtggtccaagccatgtatgttccacctggtgccccgaatccaaaagagtgggacgattacacatggcaaagtgcttcaaaccccagtgtattcttcaaggtgggggatacatccaggtttagtgtgccttatgtaggattggcatcagcatataattgtttttatgatggttactcacatgatgatgcagaaactcagtatggcataactgttctaaaccatatgggtagtatggcattcagaatagtaaatgaacatgatgaacataaaactcttgtcaagatcagagtttatcacagggcaaagcacgttgaagcatggattccaagagcacccagagcactaccctacacatcaatagggcgcacaaattatcctaagaatacagaaccagtaattaagaagaggaaaggtgacattaaatcctatggtttaggacctaggtacggtgggatttatacatcaaatgttaaaataatgaattaccacttgatgacaccagaagaccaccataatctgatagcaccctatccaaatagagatttagcaatagtctcaacaggaggacatggtgcagaaacaataccacactgtaactgtacatcaggtgtttactattccacatattacagaaagtattaccccataatttgtgaaaagcccaccaacatctggattgaaggaaacccttattacccaagtagatttcaagcaggagtgatgaaaggggttgggccagcagaaccaggagactgcggtgggattttgagatgcatacatggtcccattggattgttaacagctggaggtagtggatatgtttgttttgctgacatacgacagttggagtgtatcgcagaggaacaggggctgagtgattacatcacaggtttgggtagagcttttggtgtcgggttcactgaccaaatctcaacaaaagtcacagaactacaagaagtggcgaaagatttcctcaccacaaaagttttgtccaaagtggtcaaaatggtttcagctttagtgatcatttgcagaaatcatgatgacttggtcactgttacggccactctagcactacttggatgtgatggatctccctggagatttctgaagatgtacatttccaaacactttcaggtgccttacattgaaagacaagcaaatgatggatggttctggattgctaataagatttccaaactgattgaatggataaaaaacaaagtacttccccaagccaaagaaaaactagaattttgtagtaaactcaaacaacttgatatactagagagacaaataaccaccatgcatatctcgaatccaacacaggaaaaacgagagcagttgttcaacaacgtattgtggttggaacaaatgtcgcaaaagtttgccccacattatgccgttgaatcaaaaagaatcagggaactcaagaacaaaatggtaaattatatgcaatttaaaagtaaacaaagaactgaaccagtgtgtgtattaatccatggtacacccggttctggtaaatcattaacaacatccattgtgggacgtgcaattgcagaacacttcaattcagcagtatattcacttccaccagatcccaagcactttgatggttatcagcaacaggaagttgtgattatggatgatctgaaccaaaatccagacggacaggatataagcatgttttgtcaaatggtttcttcagtggatttcttgcctccaatggctagtttagataacaagggcatgttattcaccagtaattttgttctagcctccacaaattctaacacactaagccccccaacaatcttgaatcctgaagctttagtcaggagatttggttttgacctggatatatgtttgcatactacctacacaaagaatggaaaactcaatgcaggcatgtcaaccaagacatgcaaagattgccatcaaccatctaatttcaagaaatgttgccccctggtctgtggaaaagctattagcttggtagacagaactaccaacgttaggtatagtgtggatcaactggtcacagctattataagtgatttcaagagcaaaatgcaaattacagattccctagaaacactgtttcaaggaccagtgtataaagatttagagattgatgtttgcaacacaccacctccagaatgtatcaacgatttactgaaatctgtagattcagaagagattagggaatattgtaagaagaagaaatggattatacctgaaattcctaccaacatagaaagagctatgaatcaagccagcatgattattaatactattctgatgtttgtcagtacattaggtattgtttatgtcatttataaattgtttgctcaaactcaaggaccatattctggtaacccgcctcacaataaactaaaagccccaactttacgcccagttgttgtgcaaggaccaaacacagaatttgcactatccctgttaaggaaaaacataatgactataacaacctcaaagggagagttcacagggttaggcatacatgatcgtgtctgtgtgatacccacacacgcacagcctggtgatgatgtactagtgaatggtcagaaaattagagttaaggataagtacaaattagtagatccagagaacattaatctagagcttacagtgttgactttagatagaaatgaaaaattcagagatatcaggggatttatatcagaagatctagaaggtgtggatgccactttggtagtacattcaaataactttaccaacactatcttagaagttggccctgtaacaatggcaggacttattaatttgagtagcacccccactaacagaatgattcgttatgattatgcaacaaaaactgggcagtgtggaggtgtgctgtgtgctactggtaagatctttggtattcatgttggcggtaatggaagacaaggattttcagctcaacttaaaaaacaatattttgtagagaaacaaggccaagtaatagctagacataaggttagggagtttaacataaatccagtcaacacgccaaccaagtcaaaattacatcccagtgtattctatgatgttttcccaggtgacaaggaacctgctgtattgagtgacaatgatcccagactggaagttaaattgactgaatcattattctctaagtacaaggggaatgtaaatacggaacccactgaaaatatgcttgtggctgtagaccattatgcagggcaactattatcactagatatccccacttctgaacttacactaaaagaagcattatatggagtagatggactagaacctatagatattacaaccagtgcaggatttccctatgtgagtcttgggatcaaaaagagagacattctgaataaagagacccaggacacagaaaagatgaagttttatctagacaagtatggcattgacttgcctctagttacatatattaaggatgaattaagaagtgttgacaaagtccgattagggaaaagtagattaattgaagcctccagtttgaatgattctgttaacatgagaatgaaactaggcaacctttacaaagcattccatcaaaatcccggtgttctgactggatcagcagtgggttgtgatcctgatgtgttttggtctgtcatcccttgcttaatggatgggcacctgatggcatttgattactctaattttgatgcctctttgtcaccagtttggtttgtctgtctagagaaggttttgaccaagttaggctttgcaggctcttcattaattcaatcaatttgtaatacccatcatatctttagggatgaaatatatgtggttgaaggtggcatgccctcagggtgttcaggaaccagcatattcaattccatgatcaacaacataatcattaggactttgatattagatgcatataaaggaatagatttagacaaacttaaaatcttagcttacggtgatgatttgattgtttcttatccttatgaactggatccgcaagtgttggcaactcttggtaaaaattatggactaaccatcacacccccagacaaatctgaaacttttacaaaaatgacatgggaaaacttgacatttttaaagagatacttcaagcctgatcaacaatttccctttttggttcacccagttatgcccatgaaagatatacatgagtcaatcagatggacaaaggatcctaaaaacacacaggatcacgtccgatcattatgcatgttagcatggcactcaggagaaaaagagtacaatgaattcattcagaagatcagaactactgacattggaaaatgtctaattctcccagaatacagcgtacttaggaggcgctggttggacctcttttaggttaacaatatagacacttaatttgagtagaagtaggagtttataaaaaaaaaaa

SEQ ID NO: 83 - DNA, 7187 bp, Artificial Sequence
  Synthetic sequence
ttaaaacagcggatgggtatcccaccattcgacccattgggtgtagtactctggtactatgtacctttgtacgcctgtttctccccaaccacccttccttaaaattcccacccatgaaacgttagaagcttgacattaaagtacaataggtggcgccatatccaatggtgtctatgtacaagcacttctgtttccccggagcgaggtataggctgtacccactgccaaaagcctttaaccgttatccgccaaccaactacgtaacagttagtaccatcttgttcttgactggacgttcgatcaggtggattttccctccactagtttggtcgatgaggctaggaattccccacgggtgaccgtgtcctagcctgcgtggcggccaacccagcttatgctgggacgcccttttaaggacatggtgtgaagactcgcatgtgcttggttgtgagtcctccggcccctgaatgcggctaaccttaaccctggagccttatgccacgatccagtggttgtaaggtcgtaatgagcaattccgggacgggaccgactactttgggtgtccgtgtttctcatttttcttcatattgtcttatggtcacagcatatatatacatatactgtgatcatgggcgctcaggtttctacacagaaaagtggatctcacgaaaatcaaaacattttgaccaatggatcaaatcagactttcacagttataaattactataaggatgcagcaagtacatcatcagctggtcaatcactgtcaatggacccatctaagtttacagaaccagttaaagatctcatgcttaagggtgcaccagcattgaattcacccaatgttgaggcctgtggttatagtgatagagtacaacaaatcacactcgggaattcaacaataacaacacaagaagcagccaacgctgttgtgtgttatgctgaatggccagagtaccttccagatgtggacgctagtgatgtcaataaaacttcaaaaccagacacttctgtctgtaggttttacacattggatagtaagacatggacaacaggttctaaaggctggtgctggaaattaccagatgcactcaaagatatgggtgtgttcgggcaaaacatgtttttccactcactaggaagatcaggttacacagtacacgttcagtgcaatgccacaaaattccatagcggttgtctacttgtagttgtaataccagaacaccaactggcttcacatgagggtggcaatgtttcagttaaatacacattcacgcatccaggtgaacgtggtatagatttatcatctgcaaatgaagtgggagggcctgtcaaggatgtcatatacaatatgaatggtactttattaggaaatctgctcattttccctcaccagttcattaatctaagaaccaataatacagccacaatagtgataccatacataaactcagtacccattgattcaatgacacgtcacaacaatgtctcactgatggtcatccctattgcccctcttacagtaccaactggagcaactccctcactccctataacagtcacaatagcacctatgtgcactgagttctctgggataaggtccaagtcaattgtgccacaaggtttgccaactacaactttgccggggtcaggacaattcttgaccacagatgacaggcaatcccccagtgcactgccaaattatgagccaactccaagaatacacataccagggaaagttcataacttgctagaaattatacaggtagatacactcattcctatgaacaacacgcatacaaaagatgaggttaacagttacctcataccactaaatgcaaacaggcaaaatgagcaggtttttgggacaaacctgtttattggtgatggggtcttcaaaactactcttctgggtgaaattgttcagtactatacacattggtctggatcacttagattctctttgatgtatactggtcctgccttgtccagtgctaaactcattctagcatacaccccgcctggtgctcgtggtccacaggacaggagagaagcaatgctaggtactcatgttgtctgggatattggtctgcaatccaccatagtaatgacaataccatggacatcaggggtgcagtttagatatactgatccagatacatacaccagtgctggctttctatcatgttggtatcaaacttctcttatacttcccccagaaacgaccggccaggtctacttattatcattcataagtgcatgtccagattttaagcttaggctgatgaaagatactcaaactatctcacagactgttgcactcactgaaggcttaggtgatgaattagaagaagtcatcgttgagaaaacgaaacagacggtggcctcaatctcatctggtccaaaacacacacaaaaagtccccatactaactgcaaacgaaacaggggccacaatgcctgttcttccatcagacagcatagaaaccagaactacctacatgcactttaatggttcagaaactgatgtagaatgctttttgggtcgtgcagcttgtgtgcatgtaactgaaatacaaaacaaagatgctactggaatagataatcacagagaagcaaaattgttcaatgattggaaaatcaacctgtccagccttgtccaacttagaaagaaactagaactcttcacttatgttaggtttgattctgagtataccatactggccactgcatctcaacctgattcagcaaactattcaagcaatttggtggtccaagccatgtatgttccacctggtgccccgaatccaaaagagtgggacgattacacatggcaaagtgcttcaaaccccagtgtattcttcaaggtgggggatacatccaggtttagtgtgccttatgtaggattggcatcagcatataattgtttttatgatggttactcacatgatgatgcagaaactcagtatggcataactgttctaaaccatatgggtagtatggcattcagaatagtaaatgaacatgatgaacataaaactcttgtcaagatcagagtttatcacagggcaaagcacgttgaagcatggattccaagagcacccagagcactaccctacacatcaatagggcgcacaaattatcctaagaatacagaaccagtaattaagaagaggaaaggtgacattaaatcctatggtttaggacctaggtacggtgggatttatacatcaaatgttaaaataatgaattaccacttgatgacaccagaagaccaccataatctgatagcaccctatccaaatagagatttagcaatagtctcaacaggaggacatggtgcagaaacaataccacactgtaactgtacatcaggtgtttactattccacatattacagaaagtattaccccataatttgtgaaaagcccaccaacatctggattgaaggaaacccttattacccaagtagatttcaagcaggagtgatgaaaggggttgggccagcagaaccaggagactgcggtgggattttgagatgcatacatggtcccattggattgttaacagctggaggtagtggatatgtttgttttgctgacatacgacagttggagtgtatcgcagaggaacaggggctgagtgattacatcacaggtttgggtagagcttttggtgtcgggttcactgaccaaatctcaacaaaagtcacagaactacaagaagtggcgaaagatttcctcaccacaaaagttttgtccaaagtggtcaaaatggtttcagctttagtgatcatttgcagaaatcatgatgacttggtcactgttacggccactctagcactacttggatgtgatggatctccctggagatttctgaagatgtacatttccaaacactttcaggtgccttacattgaaagacaagcaaatgatggatggttcagaaagtttaatgatgcatgtaatgctgcaaagggattggaatggattgctaataagatttccaaactgattgaatggataaaaaacaaagtacttccccaagccaaagaaaaactagaattttgtagtaaactcaaacaacttgatatactagagagacaaataaccaccatgcatatctcgaatccaacacaggaaaaacgagagcagttgttcaacaacgtattgtggttggaacaaatgtcgcaaaagtttgccccacattatgccgttgaatcaaaaagaatcagggaactcaagaacaaaatggtaaattatatgcaatttaaaagtaaacaaagaactgaaccagtgtgtgtattaatccatggtacacccggttctggtaaatcattaacaacatccattgtgggacgtgcaattgcagaacacttcaattcagcagtatattcacttccaccagatcccaagcactttgatggttatcagcaacaggaagttgtgattatggatgatctgaaccaaaatccagacggacaggatataagcatgttttgtcaaatggtttcttcagtggatttcttgcctccaatggctagtttagataacaagggcatgttattcaccagtaattttgttctagcctccacaaattctaacacactaagccccccaacaatcttgaatcctgaagctttagtcaggagatttggttttgacctggatatatgtttgcatactacctacacaaagaatggaaaactcaatgcaggcatgtcaaccaagacatgcaaagattgccatcaaccatctaatttcaagaaatgttgccccctggtctgtggaaaagctattagcttggtagacagaactaccaacgttaggtatagtgtggatcaactggtcacagctattataagtgatttcaagagcaaaatgcaaattacagattccctagaaacactgtttcaaggaccagtgtataaagatttagagattgatgtttgcaacacaccacctccagaatgtatcaacgatttactgaaatctgtagattcagaagagattagggaatattgtaagaagaagaaatggattatacctgaaattcctaccaacatagctattctgatgtttgtcagtacattaggtattgtttatgtcatttataaattgtttgctcaaactcaaggaccatattctggtaacccgcctcacaataaactaaaagccccaactttacgcccagttgttgtgcaaggaccaaacacagaatttgcactatccctgttaaggaaaaacataatgactataacaacctcaaagggagagttcacagggttaggcatacatgatcgtgtctgtgtgatacccacacacgcacagcctggtgatgatgtactagtgaatggtcagaaaattagagttaaggataagtacaaattagtagatccagagaacattaatctagagcttacagtgttgactttagatagaaatgaaaaattcagagatatcaggggatttatatcagaagatctagaaggtgtggatgccactttggtagtacattcaaataactttaccaacactatcttagaagttggccctgtaacaatggcaggacttattaatttgagtagcacccccactaacagaatgattcgttatgattatgcaacaaaaactgggcagtgtggaggtgtgctgtgtgctactggtaagatctttggtattcatgttggcggtaatggaagacaaggattttcagctcaacttaaaaaacaatattttgtagagaaacaaggccaagtaatagctagacataaggttagggagtttaacataaatccagtcaacacgccaaccaagtcaaaattacatcccagtgtattctatgatgttttcccaggtgacaaggaacctgctgtattgagtgacaatgatcccagactggaagttaaattgactgaatcattattctctaagtacaaggggaatgtaaatacggaacccactgaaaatatgcttgtggctgtagaccattatgcagggcaactattatcactagatatccccacttctgaacttacactaaaagaagcattatatggagtagatggactagaacctatagatattacaaccagtgcaggatttccctatgtgagtcttgggatcaaaaagagagacattctgaataaagagacccaggacacagaaaagatgaagttttatctagacaagtatggcattgacttgcctctagttacatatattaaggatgaattaagaagtgttgacaaagtccgattagggaaaagtagattaattgaagcctccagtttgaatgattctgttaacatgagaatgaaactaggcaacctttacaaagcattccatcaaaatcccggtgttctgactggatcagcagtgggttgtgatcctgatgtgttttggtctgtcatcccttgcttaatggatgggcacctgatggcatttgattactctaattttgatgcctctttgtcaccagtttggtttgtctgtctagagaaggttttgaccaagttaggctttgcaggctcttcattaattcaatcaatttgtaatacccatcatatctttagggatgaaatatatgtggttgaaggtggcatgccctcagggtgttcaggaaccagcatattcaattccatgatcaacaacataatcattaggactttgatattagatgcatataaaggaatagatttagacaaacttaaaatcttagcttacggtgatgatttgattgtttcttatccttatgaactggatccgcaagtgttggcaactcttggtaaaaattatggactaaccatcacacccccagacaaatctgaaacttttacaaaaatgacatgggaaaacttgacatttttaaagagatacttcaagcctgatcaacaatttccctttttggttcacccagttatgcccatgaaagatatacatgagtcaatcagatggacaaaggatcctaaaaacacacaggatcacgtccgatcattatgcatgttagcatggcactcaggagaaaaagagtacaatgaattcattcagaagatcagaactactgacattggaaaatgtctaattctcccagaatacagcgtacttaggaggcgctggttggacctcttttaggttaacaatatagacacttaatttgagtagaagtaggagtttataaaaaaaaaaa

SEQ ID NO: 84 - DNA, 7182 bp, Artificial Sequence
  Synthetic sequence
ttaaaacagcggatgggtatcccaccattcgacccattgggtgtagtactctggtactatgtacctttgtacgcctgtttctccccaaccacccttccttaaaattcccacccatgaaacgttagaagcttgacattaaagtacaataggtggcgccatatccaatggtgtctatgtacaagcacttctgtttccccggagcgaggtataggctgtacccactgccaaaagcctttaaccgttatccgccaaccaactacgtaacagttagtaccatcttgttcttgactggacgttcgatcaggtggattttccctccactagtttggtcgatgaggctaggaattccccacgggtgaccgtgtcctagcctgcgtggcggccaacccagcttatgctgggacgcccttttaaggacatggtgtgaagactcgcatgtgcttggttgtgagtcctccggcccctgaatgcggctaaccttaaccctggagccttatgccacgatccagtggttgtaaggtcgtaatgagcaattccgggacgggaccgactactttgggtgtccgtgtttctcatttttcttcatattgtcttatggtcacagcatatatatacatatactgtgatcatgggcgctcaggtttctacacagaaaagtggatctcacgaaaatcaaaacattttgaccaatggatcaaatcagactttcacagttataaattactataaggatgcagcaagtacatcatcagctggtcaatcactgtcaatggacccatctaagtttacagaaccagttaaagatctcatgcttaagggtgcaccagcattgaattcacccaatgttgaggcctgtggttatagtgatagagtacaacaaatcacactcgggaattcaacaataacaacacaagaagcagccaacgctgttgtgtgttatgctgaatggccagagtaccttccagatgtggacgctagtgatgtcaataaaacttcaaaaccagacacttctgtctgtaggttttacacattggatagtaagacatggacaacaggttctaaaggctggtgctggaaattaccagatgcactcaaagatatgggtgtgttcgggcaaaacatgtttttccactcactaggaagatcaggttacacagtacacgttcagtgcaatgccacaaaattccatagcggttgtctacttgtagttgtaataccagaacaccaactggcttcacatgagggtggcaatgtttcagttaaatacacattcacgcatccaggtgaacgtggtatagatttatcatctgcaaatgaagtgggagggcctgtcaaggatgtcatatacaatatgaatggtactttattaggaaatctgctcattttccctcaccagttcattaatctaagaaccaataatacagccacaatagtgataccatacataaactcagtacccattgattcaatgacacgtcacaacaatgtctcactgatggtcatccctattgcccctcttacagtaccaactggagcaactccctcactccctataacagtcacaatagcacctatgtgcactgagttctctgggataaggtccaagtcaattgtgccacaaggtttgccaactacaactttgccggggtcaggacaattcttgaccacagatgacaggcaatcccccagtgcactgccaaattatgagccaactccaagaatacacataccagggaaagttcataacttgctagaaattatacaggtagatacactcattcctatgaacaacacgcatacaaaagatgaggttaacagttacctcataccactaaatgcaaacaggcaaaatgagcaggtttttgggacaaacctgtttattggtgatggggtcttcaaaactactcttctgggtgaaattgttcagtactatacacattggtctggatcacttagattctctttgatgtatactggtcctgccttgtccagtgctaaactcattctagcatacaccccgcctggtgctcgtggtccacaggacaggagagaagcaatgctaggtactcatgttgtctgggatattggtctgcaatccaccatagtaatgacaataccatggacatcaggggtgcagtttagatatactgatccagatacatacaccagtgctggctttctatcatgttggtatcaaacttctcttatacttcccccagaaacgaccggccaggtctacttattatcattcataagtgcatgtccagattttaagcttaggctgatgaaagatactcaaactatctcacagactgttgcactcactgaaggcttaggtgatgaattagaagaagtcatcgttgagaaaacgaaacagacggtggcctcaatctcatctggtccaaaacacacacaaaaagtccccatactaactgcaaacgaaacaggggccacaatgcctgttcttccatcagacagcatagaaaccagaactacctacatgcactttaatggttcagaaactgatgtagaatgctttttgggtcgtgcagcttgtgtgcatgtaactgaaatacaaaacaaagatgctactggaatagataatcacagagaagcaaaattgttcaatgattggaaaatcaacctgtccagccttgtccaacttagaaagaaactagaactcttcacttatgttaggtttgattctgagtataccatactggccactgcatctcaacctgattcagcaaactattcaagcaatttggtggtccaagccatgtatgttccacctggtgccccgaatccaaaagagtgggacgattacacatggcaaagtgcttcaaaccccagtgtattcttcaaggtgggggatacatccaggtttagtgtgccttatgtaggattggcatcagcatataattgtttttatgatggttactcacatgatgatgcagaaactcagtatggcataactgttctaaaccatatgggtagtatggcattcagaatagtaaatgaacatgatgaacataaaactcttgtcaagatcagagtttatcacagggcaaagcacgttgaagcatggattccaagagcacccagagcactaccctacacatcaatagggcgcacaaattatcctaagaatacagaaccagtaattaagaagaggaaaggtgacattaaatcctatggtttaggacctaggtacggtgggatttatacatcaaatgttaaaataatgaattaccacttgatgacaccagaagaccaccataatctgatagcaccctatccaaatagagatttagcaatagtctcaacaggaggacatggtgcagaaacaataccacactgtaactgtacatcaggtgtttactattccacatattacagaaagtattaccccataatttgtgaaaagcccaccaacatctggattgaaggaaacccttattacccaagtagatttcaagcaggagtgatgaaaggggttgggccagcagaaccaggagactgcggtgggattttgagatgcatacatggtcccattggattgttaacagctggaggtagtggatatgtttgttttgctgacatacgacagttggagtgtatcgcagaggaacaggggctgagtgattacatcacaggtttgggtagagcttttggtgtcgggttcactgaccaaatctcaacaaaagtcacagaactacaagaagtggcgaaagatttcctcaccacaaaagttttgtccaaagtggtcaaaatggtttcagctttagtgatcatttgcagaaatcatgatgacttggtcactgttacggccactctagcactacttggatgtgatggatctccctggagatttctgaagatgtacatttccaaacactttcaggtgccttacattgaaagacaagcaaatgatggatggttcagaaagtttaatgatgcatgtaatgctgcaaagggattggaatggattgctaataagatttccaaactgattgaatggataaaaaacaaagtacttccccaagccaaagaaaaactagaattttgtagtaaactcaaacaacttgatatactagagagacaaataaccaccatgcatatctcgaatccaacacaggaaaaacgagagcagttgttcaacaacgtattgtggttggaacaaatgtcgcaaaagtttgccccacattatgccgttgaatcaaaaagaatcagggaactcaagaacaaaatggtaaattatatgcaatttaaaagtaaacaaagaactgaaccagtgtgtgtattaatccatggtacacccggttctggtaaatcattaacaacatccattgtgggacgtgcaattgcagaacacttcaattcagcagtatattcacttccaccagatcccaagcactttgatggttatcagcaacaggaagttgtgattatggatgatctgaaccaaaatccagacggacaggatataagcatgttttgtcaaatggtttcttcagtggatttcttgcctccaatggctagtttagataacaagggcatgttattcaccagtaattttgttctagcctccacaaattctaacacactaagccccccaacaatcttgaatcctgaagctttagtcaggagatttggttttgacctggatatatgtttgcatactacctacacaaagaatggaaaactcaatgcaggcatgtcaaccaagacatgcaaagattgccatcaaccatctaatttcaagaaatgttgccccctggtctgtggaaaagctattagcttggtagacagaactaccaacgttaggtatagtgtggatcaactggtcacagctattataagtgatttcaagagcaaaatgcaaattacagattccctagaaacactgtttcaaggaccagtgtataaagatttagagattgatgtttgcaacacaccacctccagaatgtatcaacgatttactgaaatctgtagattcagaagagattagggaatattgtaagaagaagaaatggattatacctgaaattcctaccaacatagaaagagctatgaatcaagccagcatgattattaatactattctgatgtttgtcagtacattaggtattgtttatgtcatttataaattgtttgctcaaactcaaggaccatattctggtaacccgcctcacaataaactaaaagccccaactttacgcccagttgttgtgcaaggaccaaacacagaatttgcactatccctgttaaggaaaaacataatgactataacaacctcaaagggagagttcacagggttaggcatacatgatcgtgtctgtgtgatacccacacacgcacagcctggtgatgatgtactagtgaatggtcagaaaattagagttaaggataagtacaatgactttagatagaaatgaaaaattcagagatatcaggggatttatatcagaagatctagaaggtgtggatgccactttggtagtacattcaaataactttaccaacactatcttagaagttggccctgtaacaatggcaggacttattaatttgagtagcacccccactaacagaatgattcgttatgattatgcaacaaaaactgggcagtgtggaggtgtgctgtgtgctactggtaagatctttggtattcatgttggcggtaatggaagacaaggattttcagctcaacttaaaaaacaatattttgtagagaaacaaggccaagtaatagctagacataaggttagggagtttaacataaatccagtcaacacgccaaccaagtcaaaattacatcccagtgtattctatgatgttttcccaggtgacaaggaacctgctgtattgagtgacaatgatcccagactggaagttaaattgactgaatcattattctctaagtacaaggggaatgtaaatacggaacccactgaaaatatgcttgtggctgtagaccattatgcagggcaactattatcactagatatccccacttctgaacttacactaaaagaagcattatatggagtagatggactagaacctatagatattacaaccagtgcaggatttccctatgtgagtcttgggatcaaaaagagagacattctgaataaagagacccaggacacagaaaagatgaagttttatctagacaagtatggcattgacttgcctctagttacatatattaaggatgaattaagaagtgttgacaaagtccgattagggaaaagtagattaattgaagcctccagtttgaatgattctgttaacatgagaatgaaactaggcaacctttacaaagcattccatcaaaatcccggtgttctgactggatcagcagtgggttgtgatcctgatgtgttttggtctgtcatcccttgcttaatggatgggcacctgatggcatttgattactctaattttgatgcctctttgtcaccagtttggtttgtctgtctagagaaggttttgaccaagttaggctttgcaggctcttcattaattcaatcaatttgtaatacccatcatatctttagggatgaaatatatgtggttgaaggtggcatgccctcagggtgttcaggaaccagcatattcaattccatgatcaacaacataatcattaggactttgatattagatgcatataaaggaatagatttagacaaacttaaaatcttagcttacggtgatgatttgattgtttcttatccttatgaactggatccgcaagtgttggcaactcttggtaaaaattatggactaaccatcacacccccagacaaatctgaaacttttacaaaaatgacatgggaaaacttgacatttttaaagagatacttcaagcctgatcaacaatttccctttttggttcacccagttatgcccatgaaagatatacatgagtcaatcagatggacaaaggatcctaaaaacacacaggatcacgtccgatcattatgcatgttagcatggcactcaggagaaaaagagtacaatgaattcattcagaagatcagaactactgacattggaaaatgtctaattctcccagaatacagcgtacttaggaggcgctggttggacctcttttaggttaacaatatagacacttaatttgagtagaagtaggagtttataaaaaaaaaaa

SEQ ID NO: 85 - DNA, 7176 bp, Artificial Sequence
  Synthetic sequence
ttaaaacagcggatgggtatcccaccattcgacccattgggtgtagtactctggtactatgtacctttgtacgcctgtttctccccaaccacccttccttaaaattcccacccatgaaacgttagaagcttgacattaaagtacaataggtggcgccatatccaatggtgtctatgtacaagcacttctgtttccccggagcgaggtataggctgtacccactgccaaaagcctttaaccgttatccgccaaccaactacgtaacagttagtaccatcttgttcttgactggacgttcgatcaggtggattttccctccactagtttggtcgatgaggctaggaattccccacgggtgaccgtgtcctagcctgcgtggcggccaacccagcttatgctgggacgcccttttaaggacatggtgtgaagactcgcatgtgcttggttgtgagtcctccggcccctgaatgcggctaaccttaaccctggagccttatgccacgatccagtggttgtaaggtcgtaatgagcaattccgggacgggaccgactactttgggtgtccgtgtttctcatttttcttcatattgtcttatggtcacagcatatatatacatatactgtgatcatgggcgctcaggtttctacacagaaaagtggatctcacgaaaatcaaaacattttgaccaatggatcaaatcagactttcacagttataaattactataaggatgcagcaagtacatcatcagctggtcaatcactgtcaatggacccatctaagtttacagaaccagttaaagatctcatgcttaagggtgcaccagcattgaattcacccaatgttgaggcctgtggttatagtgatagagtacaacaaatcacactcgggaattcaacaataacaacacaagaagcagccaacgctgttgtgtgttatgctgaatggccagagtaccttccagatgtggacgctagtgatgtcaataaaacttcaaaaccagacacttctgtctgtaggttttacacattggatagtaagacatggacaacaggttctaaaggctggtgctggaaattaccagatgcactcaaagatatgggtgtgttcgggcaaaacatgtttttccactcactaggaagatcaggttacacagtacacgttcagtgcaatgccacaaaattccatagcggttgtctacttgtagttgtaataccagaacaccaactggcttcacatgagggtggcaatgtttcagttaaatacacattcacgcatccaggtgaacgtggtatagatttatcatctgcaaatgaagtgggagggcctgtcaaggatgtcatatacaatatgaatggtactttattaggaaatctgctcattttccctcaccagttcattaatctaagaaccaataatacagccacaatagtgataccatacataaactcagtacccattgattcaatgacacgtcacaacaatgtctcactgatggtcatccctattgcccctcttacagtaccaactggagcaactccctcactccctataacagtcacaatagcacctatgtgcactgagttctctgggataaggtccaagtcaattgtgccacaaggtttgccaactacaactttgccggggtcaggacaattcttgaccacagatgacaggcaatcccccagtgcactgccaaattatgagccaactccaagaatacacataccagggaaagttcataacttgctagaaattatacaggtagatacactcattcctatgaacaacacgcatacaaaagatgaggttaacagttacctcataccactaaatgcaaacaggcaaaatgagcaggtttttgggacaaacctgtttattggtgatggggtcttcaaaactactcttctgggtgaaattgttcagtactatacacattggtctggatcacttagattctctttgatgtatactggtcctgccttgtccagtgctaaactcattctagcatacaccccgcctggtgctcgtggtccacaggacaggagagaagcaatgctaggtactcatgttgtctgggatattggtctgcaatccaccatagtaatgacaataccatggacatcaggggtgcagtttagatatactgatccagatacatacaccagtgctggctttctatcatgttggtatcaaacttctcttatacttcccccagaaacgaccggccaggtctacttattatcattcataagtgcatgtccagattttaagcttaggctgatgaaagatactcaaactatctcacagactgttgcactcactgaaggcttaggtgatgaattagaagaagtcatcgttgagaaaacgaaacagacggtggcctcaatctcatctggtccaaaacacacacaaaaagtccccatactaactgcaaacgaaacaggggccacaatgcctgttcttccatcagacagcatagaaaccagaactacctacatgcactttaatggttcagaaactgatgtagaatgctttttgggtcgtgcagcttgtgtgcatgtaactgaaatacaaaacaaagatgctactggaatagataatcacagagaagcaaaattgttcaatgattggaaaatcaacctgtccagccttgtccaacttagaaagaaactagaactcttcacttatgttaggtttgattctgagtataccatactggccactgcatctcaacctgattcagcaaactattcaagcaatttggtggtccaagccatgtatgttccacctggtgccccgaatccaaaagagtgggacgattacacatggcaaagtgcttcaaaccccagtgtattcttcaaggtgggggatacatccaggtttagtgtgccttatgtaggattggcatcagcatataattgtttttatgatggttactcacatgatgatgcagaaactcagtatggcataactgttctaaaccatatgggtagtatggcattcagaatagtaaatgaacatgatgaacataaaactcttgtcaagatcagagtttatcacagggcaaagcacgttgaagcatggattccaagagcacccagagcactaccctacacatcaatagggcgcacaaattatcctaagaatacagaaccagtaattaagaagaggaaaggtgacattaaatcctatggtttaggacctaggtacggtgggatttatacatcaaatgttaaaataatgaattaccacttgatgacaccagaagaccaccataatctgatagcaccctatccaaatagagatttagcaatagtctcaacaggaggacatggtgcagaaacaataccacactgtaactgtacatcaggtgtttactattccacatattacagaaagtattaccccataatttgtgaaaagcccaccaacatctggattgaaggaaacccttattacccaagtagatttcaagcaggagtgatgaaaggggttgggccagcagaaccaggagactgcggtgggattttgagatgcatacatggtcccattggattgttaacagctggaggtagtggatatgtttgttttgctgacatacgacagttggagtgtatcgcagaggaacaggggctgagtgattacatcacaggtttgggtagagcttttggtgtcgggttcactgaccaaatctcaacaaaagtcacagaactacaagaagtggcgaaagatttcctcaccacaaaagttttgtccaaagtggtcaaaatggtttcagctttagtgatcatttgcagaaatcatgatgacttggtcactgttacggccactctagcactacttggatgtgatggatctccctggagatttctgaagatgtacatttccaaacactttcaggtgccttacattgaaagacaagcaaatgatggatggttcagaaagtttaatgatgcatgtaatgctgcaaagggattggaatggattgctaataagatttccaaactgattgaatggataaaaaacaaagtacttccccaagccaaagaaaaactagaattttgtagtaaactcaaacaacttgatatactagagagacaaataaccaccatgcatatctcgaatccaacacaggaaaaacgagagcagttgttcaacaacgtattgtggttggaacaaatgtcgcaaaagtttgccccacattatgccgttgaatcaaaaagaatcagggaactcaagaacaaaatggtaaattatatgcaatttaaaagtaaacaaagaactgaaccagtgtgtgtattaatccatggtacacccggttctggtaaatcattaacaacatccattgtgggacgtgcaattgcagaacacttcaattcagcagtatattcacttccaccagatcccaagcactttgatggttatcagcaacaggaagttgtgattatggatgatctgaaccaaaatccagacggacaggatataagcatgttttgtcaaatggtttcttcagtggatttcttgcctccaatggctagtttagataacaagggcatgttattcaccagtaattttgttctagcctccacaaattctaacacactaagccccccaacaatcttgaatcctgaagctttagtcaggagatttggttttgacctggatatatgtttgcatactacctacacaaagaatggaaaactcaatgcaggcatgtcaaccaagacatgcaaagattgccatcaaccatctaatttcaagaaatgttgccccctggtctgtggaaaagctattagcttggtagacagaactaccaacgttaggtatagtgtggatcaactggtcacagctattataagtgatttcaagagcaaaatgcaaattacagattccctagaaacactgtttcaaggaccagtgtataaagatttagagattgatgtttgcaacacaccacctccagaatgtatcaacgatttactgaaatctgtagattcagaagagattagggaatattgtaagaagaagaaatggattatacctgaaattcctaccaacatagaaagagctatgaatcaagccagcatgattattaatactattctgatgtttgtcagtacattaggtattgtttatgtcatttataaattgtttgctcaaactcaaggaccatattctggtaacccgcctcacaataaactaaaagccccaactttacgcccagttgttgtgcaaggaccaaacacagaatttgcactatccctgttaaggaaaaacataatgactataacaacctcaaagggagagttcacagggttaggcatacatgatcgtgtctgtgtgatacccacacacgcacagcctggtgatgatgtactagtgaatggtcagaaaattagagttaaggataagtacaaattagtagatccagagaacattaatctagagcttacagtgttgactttagatagaaatgaaaaattcagagatatcaggggatttatatcagaagatctagaaggtgtggatgccactttggtagtacattcaaataactttaccaacactatcttagaagttggccctgtaacaatggcaggacttattaatttgagtagcacccccactaacagaatgattcgttatgattatgcaacaaaaactgggcagtgtggaggtgtgctgtgtgctactggtaagatctttggtattcatgttggcggtaatggaagacaaggattttcagctcaacttaaaaaacaatattttgtagagaaacaaggccaagtaatagctagacataaggttagggagtttaacataaatccagtcaacacgccaaccaagtcaaaattacatcccagtgtattctatgatgttttcccaggtgacaaggaacctgctgtattgagtgacaatgatcccagactggaagttaaattgactgaatcattattctctaagtacaaggggaatgtaaatacggaacccactgaaaatatgcttgtggctgtagaccattatgcagggcaactattatcactagatatccccacttctgaacttacactaaaagaagcattatatggagtagatggactagaacctatagatattacaacttctgaataaagagacccaggacacagaaaagatgaagttttatctagacaagtatggcattgacttgcctctagttacatatattaaggatgaattaagaagtgttgacaaagtccgattagggaaaagtagattaattgaagcctccagtttgaatgattctgttaacatgagaatgaaactaggcaacctttacaaagcattccatcaaaatcccggtgttctgactggatcagcagtgggttgtgatcctgatgtgttttggtctgtcatcccttgcttaatggatgggcacctgatggcatttgattactctaattttgatgcctctttgtcaccagtttggtttgtctgtctagagaaggttttgaccaagttaggctttgcaggctcttcattaattcaatcaatttgtaatacccatcatatctttagggatgaaatatatgtggttgaaggtggcatgccctcagggtgttcaggaaccagcatattcaattccatgatcaacaacataatcattaggactttgatattagatgcatataaaggaatagatttagacaaacttaaaatcttagcttacggtgatgatttgattgtttcttatccttatgaactggatccgcaagtgttggcaactcttggtaaaaattatggactaaccatcacacccccagacaaatctgaaacttttacaaaaatgacatgggaaaacttgacatttttaaagagatacttcaagcctgatcaacaatttccctttttggttcacccagttatgcccatgaaagatatacatgagtcaatcagatggacaaaggatcctaaaaacacacaggatcacgtccgatcattatgcatgttagcatggcactcaggagaaaaagagtacaatgaattcattcagaagatcagaactactgacattggaaaatgtctaattctcccagaatacagcgtacttaggaggcgctggttggacctcttttaggttaacaatatagacacttaatttgagtagaagtaggagtttataaaaaaaaaaa

SEQ ID NO: 86 - DNA, 6674 bp, Artificial Sequence
  Synthetic sequence
ttaaaacagcggatgggtatcccaccattcgacccattgggtgtagtactctggtactatgtacctttgtacgcctgtttctccccaaccacccttccttaaaattcccacccatgaaacgttagaagcttgacattaaagtacaataggtggcgccatatccaatggtgtctatgtacaagcacttctgtttccccggagcgaggtataggctgtacccactgccaaaagcctttaaccgttatccgccaaccaactacgtaacagttagtaccatcttgttcttgactggacgttcgatcaggtggattttccctccactagtttggtcgatgaggctaggaattccccacgggtgaccgtgtcctagcctgcgtggcggccaacccagcttatgctgggacgcccttttaaggacatggtgtgaagactcgcatgtgcttggttgtgagtcctccggcccctgaatgcggctaaccttaaccctggagccttatgccacgatccagtggttgtaaggtcgtaatgagcaattccgggacgggaccgactactttgggtgtccgtgtttctcatttttcttcatattgtcttatggtcacagcatatatatacatatactgtgatcatgggcgctcaggtttctacacagaaaagtggatctcacgaaaatcaaaacattttgaccaatggatcaaatcagactttcacagttataaattactataaggatgcagcaagtacatcatcagctggtcaatcactgtcaatggacccatctaagtttacagaaccagttaaagatctcatgcttaagggtgcaccagcattgaattcacccaatgttgaggcctgtggttatagtgatagagtacaacaaatcacactcgggaattcaacaataacaacacaagaagcagccaacgctgttgtgtgttatgctgaatggccagagtaccttccagatgtggacgctagtgatgtcaataaaacttcaaaaccagacacttctgtctgtaggttttacacattggatagtaagacatggacaacaggttctaaaggctggtgctggaaattaccagatgcactcaaagatatgggtgtgttcgggcaaaacatgtttttccactcactaggaagatcaggttacacagtacacgttcagtgcaatgccacaaaattccatagcggttgtctacttgtagttgtaataccagaacaccaactggcttcacatgagggtggcaatgtttcagttaaatacacattcacgcatccaggtgaacgtggtatagatttatcatctgcaaatgaagtgggagggcctgtcaaggatgtcatatacaatatgaatggtactttattaggaaatctgctcattttccctcaccagttcattaatctaagaaccaataatacagccacaatagtgataccatacataaactcagtacccattgattcaatgacacgtcacaacaatgtctcactgatggtcatccctattgcccctcttacagtaccaactggagcaactccctcactccctataacagtcacaatagcacctatgtgcactgagttctctgggataaggtccaagtcaattgtgccacaaggtttgccaactacaactttgccggggtcaggacaattcttgaccacagatgacaggcaatcccccagtgcactgccaaattatgagccaactccaagaatacacataccagggaaagttcataacttgctagaaattatacaggtagatacactcattcctatgaacaacacgcatacaaaagatgaggttaacagttacctcataccactaaatgcaaacaggcaaaatgagcaggtttttgggacaaacctgtttattggtgatggggtcttcaaaactactcttctgggtgaaattgttcagtactatacacattggtctggatcacttagattctctttgatgtatactggtcctgccttgtccagtgctaaactcattctagcatacaccccgcctggtgctcgtggtccacaggacaggagagaagcaatgctaggtactcatgttgtctgggatattggtctgcaatccaccatagtaatgacaataccatggacatcaggggtgcagtttagatatactgatccagatacatacaccagtgctggctttctatcatgttggtatcaaacttctcttatacttcccccagaaacgaccggccaggtctacttattatcattcataagtgcatgtccagattttaagcttaggctgatgaaagatactcaaactatctcacagactgttgcactcactgaaggcttaggtgatgaattagaagaagtcatcgttgagaaaacgaaacagacggtggcctcaatctcatctggtccaaaacacacacaaaaagtccccatactaactgcaaacgaaacaggggccacaatgcctgttcttccatcagacagcatagaaaccagaactacctacatgcactttaatggttcagaaactgatgtagaatgctttttgggtcgtgcagcttgtgtgcatgtaactgaaatacaaaacaaagatgctactggaatagataatcacagagaagcaaaattgttcaatgattggaaaatcaacctgtccagccttgtccaacttagaaagaaactagaactcttcacttatgttaggtttgattctgagtataccatactggccactgcatctcaacctgattcagcaaactattcaagcaatttggtggtccaagccatgtatgttccacctggtgccccgaatccaaaagagtgggacgattacacatggcaaagtgcttcaaaccccagtgtattcttcaaggtgggggatacatccaggtttagtgtgccttatgtaggattggcatcagcatataattgtttttatgatggttactcacatgatgatgcagaaactcagtatggcataactgttctaaaccatatgggtagtatggcattcagaatagtaaatgaacatgatgaacataaaactcttgtcaagatcagagtttatcacagggcaaagcacgttgaagcatggattccaagagcacccagagcactaccctacacatcaatagggcgcacaaattatcctaagaatacagaaccagtaattaagaagaggaaaggtgacattaaatcctatggtttaggacctaggtacggtgggatttatacatcaaatgttaaaataatgaattaccacttgatgacaccagaagaccaccataatctgatagcaccctatccaaatagagatttagcaatagtctcaacaggaggacatggtgcagaaacaataccacactgtaactgtacatcaggtgtttactattccacatattacagaaagtattaccccataatttgtgaaaagcccaccaacatctggattgaaggaaacccttattacccaagtagatttcaagcaggagtgatgaaaggggttgggccagcagaaccaggagactgcggtgggattttgagatgcatacatggtcccattggattgttaacagctggaggtagtggatatgtttgttttgctgacatacgacagttggagtgtatcgcagaggaacaggggctgagtgattacatcacaggtttgggtagagcttttggtgtcgggttcactgaccaaatctcaacaaaagtcacagaactacaagaagtggcgaaagatttcctcaccacaaaagttttgtccaaagtggtcaaaatggtttcagctttagtgatcatttgcagaaatcatgatgacttggtcactgttacggccactctagcactacttggatgtgatggatctccctggagatttctgaagatgtacatttccaaacactttcaggtgccttacattgaaagacaagcaaatgatggatggttcagaaagtttaatgatgcatgtaatgctgcaaagggattggaatggattgctaataagatttccaaactgattgaatggataaaaaacaaagtacttccccaagccaaagaaaaactagaattttgtagtaaactcaaacaacttgatatactagagagacaaataaccaccatgcatatctcgaatccaacacaggaaaaacgagagcagttgttcaacaacgtattgtggttggaacaaatgtcgcaaaagtttgccccacattatgccgttgaatcaaaaagaatcagggaactcaagaacaaaatggtaaattatatgcaatttaaaagtaaacaaagaactgaaccagtgtgtgtattaatccatggtacacccggttctggtaaatcattaacaacatccattgtgggacgtgcaattgcagaacacttcaattcagcagtatattcacttccaccagatcccaagcactttgatggttatcagcaacaggaagttgtgattatggatgatctgaaccaaaatccagacggacaggatataagcatgttttgtcaaatggtttcttcagtggatttcttgcctccaatggctagtttagataacaagggcatgttattcaccagtaattttgttctagcctccacaaattctaacacactaagccccccaacaatcttgaatcctgaagctttagtcaggagatttggttttgacctggatatatgtttgcatactacctacacaaagaatggaaaactcaatgcaggcatgtcaaccaagacatgcaaagattgccatcaaccatctaatttcaagaaatgttgccccctggtctgtggaaaagctattagcttggtagacagaactaccaacgttaggtatagtgtggatcaactggtcacagctattataagtgatttcaagagcaaaatgcaaattacagattccctagaaacactgtttcaaggaccagtgtataaagatttagagattgatgtttgcaacacaccacctccagaatgtatcaacgatttactgaaatctgtagattcagaagagattagggaatattgtaagaagaagaaatggattatacctgaaattcctaccaacatagaaagagctatgaatcaagccagcatgattattaatactattctgatgtttgtcagtacattaggtattgtttatgtcatttataaattgtttgctcaaactcaaggaccatattctggtaacccgcctcacaataaactaaaagccccaactttacgcccagttgttgtgcaaggaccaaacacagaatttgcactatccctgttaaggaaaaacataatgactataacaacctcaaagggagagttcacagggttaggcatacatgatcgtgtctgtgtgatacccacacacgcacagcctggtgatgatgtactagtgaatggtcagaaaattagagttaaggataagtacaaattagtagatccagagaacattaatctagagcttacagtgttgactttagatagaaatgaaaaattcagagatatcaggggatttatatcagaagatctagaaggtgtggatgccactttggtagtacattcaaataactttaccaacactatcttagaagttggccctgtaacaatggcaggacttattaatttgagtagcacccccactaacagaatgattcgttatgattatgcaacaaaaactgggcagtgtggaggtgtgctgtgtgctactggtaagatctttggtattcatgttggcggtaatggaagacaaggattttcagctcaacttaaaaaacaatattttgtagagaaacaaggccaagtaatagctagacataaggttagggagtttaacataaatccagtcaacacgccaaccaagtcaaaattacatcccagtgtattctatgatgttttcccaggtgacaaggaacctgctgtattgagtgacaatgatcccagactggaagttaaattgactgaatcattattctctaagtacaaggggaatgtaaatacggaacccactgaaaatatgcttgtggctgtagaccattatgcagggcaactattatcactagatatccccacttctgaacttacactaaaagaagcattatatggagtagatggactagaacctatagatattacaaccagtgcaggatttccctatgtgagtcttgggatcaaaaagagagacattctgaataaagagacccaggacacagaaaagatgaagttttatctagacaagtatggcattgacttgcctctagttacatatattaaggatgaattaagaagtgttgacaaagtccgattagggaaaagtagattaattgaagcctccagtttgaatgattctgttaacatgagaatgaaactaggcaacctttacaaagcattccatcaaaatcccggtgttctgactggatcagcagtgggttgtgatcctgatgtgttttggtctgtaaaggatcctaaaaacacacaggatcacgtccgatcattatgcatgttagcatggcactcaggagaaaaagagtacaatgaattcattcagaagatcagaactactgacattggaaaatgtctaattctcccagaatacagcgtacttaggaggcgctggttggacctcttttaggttaacaatatagacacttaatttgagtagaagtaggagtttataaaaaaaaaaa

SEQ ID NO: 87 - DNA, 1106 bp, Artificial Sequence
  Synthetic sequence
ttaaaacagcggatgggtatcccaccattcgacccattgggtgtagtactctggtactatgtacctttgtacgcctgtttctccccaaccacccttccttaaaattcccacccatgaaacgttagaagcttgacattaaagtacaataggtggcgccatatccaatggtgtctatgtacaagcacttctgtttccccggagcgaggtataggctgtacccactgccaaaagcctttaaccgttatccgccaaccaactacgtaacagttagtaccatcttgttcttgactggacgttcgatcaggtggattttccctccactagtttggtcgatgaggctaggaattccccacgggtgaccgtgtcctagcctgcgtggcggccaacccagcttatgctgggacgcccttttaaggacatggtgtgaagactcgcatgtgcttggttgtgagtcctccggcccctgaatgcggctaaccttaaccctggagccttatgccacgatccagtggttgtaaggtcgtaatgagcaattccgggacgggaccgactactttgggtgtccgtgtttctcatttttcttcatattgtcttatggtcacagcatatatatacatatactgtgatcaagcttaggctgatgaaagatactcaaactatctcacagactgttgcactcactgaaggcttaggtgatgaattagaagaagtcatcgttgagaaaacgaaacagacggtggcctcaatctcatctggtccaaaacacacacaaaaagtccccatactaactgcaaacgaaacaggggccacaatgcctgttcttccatcagacagcatagaaaccagaactacctacatgcactttaatggttcagaaactgatgtagaatgctttttgggtcgtgcagcttgtgtgcatgtaactgaaatacaaaacaaagatgctactggaatagataatcacagagaagcaaaattgttcaatgattggaaaatcaacctgtccagccttgtccaacttagaaagaaactagaactcttcacttattaggttaacaatatagacacttaatttgagtagaagtaggagtttataaaaaaaaaaa

SEQ ID NO: 88 - DNA, 7140 bp, Artificial Sequence
  Synthetic sequence
ttaaaactgggtataggttgttcccacctgtaccacccacgtggtgtagtgctcctgtattccggtacacttgcacgccagtttgccctcccttcctgtaacgtagaagcaatgtaaacggaccaaaaggggacggcaaaccacgtcgttcaaggtcaagcacttctgtttccccggcatgcgaggaatagaccttctcaagggttgaagccacaagtgtcgttacccgcattggtactacacagagcctagtactgctctagaaacttattggttggtcgttcagccatttcccctggtagacctggcagatgaggcaagaagttccccactggtaacagtgttcttgcctgcgtggctgcctgcacaccctaacgggtgtgaagccaatgagtggacagggtgtgaagagccgcgtgtgctaccaatgagtcctccggcccctgaatgcggctaatccaaccccacagctatggcatgcaagccagcatgtgcgtagtcgtaatgagtaattgtgggacggaaccgactactttgggtgtccgtgtttcctttattctcttatgttttgcctatggtgacaatattaagtattaatattgctaccatgggcgcccaggtcagtagacaaaacaatggcacacatgagaatggtgtaacagctagcaatggatcagtcatcaagtatttcaacatcaattactataaagactcagcaagttctggtttgagtcgtcaagacttttctcaggacccatccaaatttacccaaccccttgtggatacactcacaaacccagcacttatgtcaccatctgttgaagcatgtggatattctgataggctcaagcaaatcactatcgggaattccacaatcacaacacaagactccctacacacagtacttgcatatggtgagtggcctacatacttatccgacattgatgcaacgtccgtcgataaacccactcacccagaaacatcagctgatagattttatactctggatagtgttgaatggcaagtaggctctcatggttggtggtggaagctgccagatgccctcaaagacatgggtgtgtttggccaaaatatgtattaccactcaatgggtagatcaggtttcataatccatacacagtgcaatgcaactaaatttcacagtggtgcactcatagtcgcggtgataccagaacaccaacttgcttatgtggggggggtgaaggtcaatgtaggatatgatcatacacacccagggcaaagtggtcatcaaatacgtgggcccagtcaatcaaatgaccggagcggtggcaaaccagatgaggacccactgtttaattgcaatggaacattgttagggaacataacaattttcccacatcaaattataaatttgaggaccaacaactccagcacaatagttgtaccttacataaattgtgtccctatggacaacatgctaaaacacaacaatctatctttagtgattatcccgttggtaccgctacgtccaggttctagtggcattaattctgtcccgattactgtaacaatagcaccctataagtcagaattctcaggtgccatggaggctcaacgccaaggcttgccaacgcgtcttcctagtggtagccaacaattcatgacaactgaggatgagcaatcacccaacattcttcctggcttccacccaagtaagaaaatacacatacctggaatgattacaaacgtgatgcacatggccagagtagattcattcatacccattaataatattcaaggagaagttggaaaagtgagtatgtactatatcacagtgacaaaaaagacagtgacagagaggatccttgttctgcccctagaaatgagcaacacactatttgctacaactcttttaggtgaagttctgaactactatgccaactggtcagggagtattaccatcacctttatgtgtgtgtgtgatgcgttcagcacaggaaagtttctcgttgcatacacaccaccaggaggtaaactaccagaagacaggaaacaagcaatgttaggtgttcacatcatatgggacttgggcctgcagtcgtcctgcaccattgtggtaccatggatttcatctggtttctaccgccgcaccaaagcagacagtttcacccacggtggatatgtctccttgtggtaccagacagcttttgtacccccagtgagtggagggacaggaagtattcttgccacctgtagtgcttgccccgacatgtccgttaggatgctgcgggatagcccaatgatggaacaaaagaatgaactgcaaaacaatgatgacccagttgagaactttgtagagtccaccctaaaagaggtgttagttgtgccagacacaaaaccctcaggacctcaacacacaacaaaaccgtcaatattgggtgccatggagattggtgcctccagtaacgcaaccccagaatccacaatagagactaggtatgtatacaacacaaatacaaatgcagaagcagatgtagaaatgttcctaggtaggtccgccctttggggtaaggtaacactcacacgccaatatgccaaatgggaaataaactttcaagaacaggcccacattaggaaaaaatttgagttcttcacttatctgaggtttgacatggaggttaccatagtaaccaacaacacagggttgatgcaaataatgttcgttccaccagggatagaccaccctgagacacatgatgacagaaaatgggattccgcttccaaccccagtgtatttttccaacctaaatcaggatttcctaggtttaccatcccatttactgggctagcttcagcatactacatgttttatgatggatatgacaagcccaagggttcagacaacaatgaatatggaattgctcccaccaatgacatgggtttgttatgcttcaggactttggacaatagtggtggaaatgatgtgaaaatatacgtcaaacccaaacacataacggcatgggtaccaagaccaccaagggcaacacagtacacccacaagtacagtacaaactaccattacaaacctaactctagtggacctgatgaacacgtgcttaaagacagacactttatcaaaaccagacccctcatcagctcagcgggaccgagcgacatgtttgtgcacacaagagatgcaatttataaatgtgcacatctaaccaatccaactgatgaaaccatacttctggcattgactgcagatctacaggtggatagtaccaatgttccaggccccgatgtgattccgtgttgtgattgcactgctggttgctactactctagaagcaaagacagatacttcccagtggagtgtgttagtcatgactggtatgagatacaagaatctggctactatcccaaacatatacaatataatctactcattggggaaggacactgtgaaccaggtgactgtggaggcaagttactatgcaagcatggtgtgattggtatgatcactgcaggtggtgataaccatgttgctttcactgacctacgcccatactcaagcttatcagaacaccaaggggttatttcagattacttcacccagttgggtaatgcatttggtgagggcttcacaaccaacattcaagaccacttttcacaaatcaccaagtcaatttctgacaaatttacatcaaaggctattaaatggttggtgcgcatcataagcgcccttacaattatgattagaaacaactcagacttgcctaccatacttgctactctgtcattgttggggtgtagtagctcaccatggtctttcctcaaggacaaaatctgcagctggcttcaaatccagcgtcccgcaagcaaacagagtgattcatggttgcgcaaattcacagaatgttgcaatgcagcaaaaggacttgaatggatcagtatcaagattggcaagtttattgattggctgaaagggaaactagtccccgctgtccagaggaaaagagacaccctagatagatgcaagaaaatatctctcttagaagaacaagtgaatggattcagttctgctagctcagaagcacaacaacaacttattgtagaagtggatactctaaagaagggtttagatgagctggcaccattgtatgctagtgaaaacaaaagggtgactaagattcaaaaagatctcaaacaactatcagcttatctaaagaaccataggcatgaaccagtttgcttattgttacatggcaacccaggatgtggaaaatcactagttacaaccataatcgctagaggactcacccaggaggcacaggtatactcactaccacctgatcccaaatatttcgatggttatgaccaacagcaggttgtcatattggatgatcttggacaaaatcctgatggtaaagatttaagcacattctgtcagatggtatcaacaacagatttcatagtacctatggcatcactagaggataagggtaagtctttcaccagccaatatgtgcttgccagcactaacctggacactctgtcaccaccaacagtcacaatacctgaggctataaaacggcgattctttctggatgccgatctcatcacaacatctaagttcagaaataccacaggactgctagatgtagcaaaggcactacaaccatgcacaggttgtcccaaaccagctcactataaaacgtgctgtcctctgttgtgtggcaaggcagttgtagttcaggacaggaaaacaaaagcaaatttctcagtgaacacaatagtagagcagctgaggcatgagaatgctaccaggaaaaaggttaaacacaaccttgatgcaatattccagggtcttggtgactcagaaacaccaggttttatagttgatctgctatcctcatctaaagaccccaaagttatagaatattgtgctgaacagggatggataggtaaagcaaactcaaccatagagagggattttaattatgtgcattacatgttaaattgcttaggtagtctaataattatcttagggactgtatatgcactatacaagctgatgtgtatgactcaaggaccttacactggcttaccaaacccccaaaccaaaagaccagagctcaggaaagccacactacagggccctgagcatgaattcgtcagggctttaattaaaagaaactgccatgtgataaccacctcaaaaggggagttcaacatgcttggaatccatgataactgtgcggtggtgccaacacacgctgaatgtggtgactctgtcacaattgacggcagggaagtcagggttcttaaacaatgcattctcactgacacaaatgacacagacactgaaataactctcctctggttagatcagaatgaaaaatttagggacattagaaggttcatcccagaacaccaacgcgaatggtcaaatatgcatcttgccacaaatgtaactaaattccccatgctagatgtggaggttggcactgtaataccatatggagaggtcaacctcagtggtaacccaacatgtcggcttctcaagtacaactatcctacaaagccaggacaatgtggtggtgtcattgcaaacacaggaaacatagtagcaattcatgttggcggaaatggacgtgtggggtatggagcagcattgctacgtaagtacttcgcacagtctcaaggtgagatcactgccaaacatgatgttagagaaaaaggtttgccacaaattaacacacctaataaaacaaaattacaacccagtgtattttatgatgtttttccaggggtgaaggaaccggcagccttaagcaatggagacccacggcttgaggttgatctcagtacatctgtgttaagtaagtacaaaggtaacacacaagtggaatggaatgataatatccagattgcagttgaccactactcagctcaactttacatgttagacatcaatcctcaaccattaaccatggaacaggcagtctatggcatagagcatctggaaccactagacctcaccaccagtgcaggattcccctatgtaactatgggtataaagaaaaaggatatagtcaacaaagtgacaaaggatgtaaccaaacttcaggaaatgattgacaaatatggaatagacttgccttatgtcacctatctaaaagatgaattgagagctcctgagaaaatcaagaaagggaaaacgagagcaatagaggcagctagcataaatgacacaacccacttccgcatggtgttcggtaatctcttttctgtattccatgctaacccaggtgtacttacaggctctgcagtaggctgtaaccctgatgtgttctggtctcaaatgtatgcatgtatggatggtgagttgcttgcttttgattacacaaactatgatggtagtttgcacccaatctggttcaaagcactaggtaaagtcttagacaatttgggattcccaggtcacttagtaaatagattgtgcaatacaacacacatctttaaaaacttgatttatactgtggaaggaggtatgccctctggtatctgtggcacaagtattttcaataccatgatcaataatataatcattagagtgttggttcttgaaacatacaagaatatagatctggacaagctaaaaattatagcatatggtgatgatgtagtagtgtcatacccttttgaattggatccaatggaaattgccaataaggcagtgaggtatgggttaaccatcactccaccagacaagggcagtacatttcataagattgattggacaaatgtcacctttctcaaaaggcatttcaaaccagacaccaaatacaaatttctgatacatccagtatacaagatggaggacatctatgaatcaattagatggacaaaggacccaaagaacacacaagaccatgttcactcattgtgtctacttgcatggcacaacggagaggaggtctatgaaaagtttagggagaaaatcagatctacaagtgttggtaaggttctctacacccctccttactcattgttgtacaggcaatggatagatcaattcatataaacaaataatataatacaatgtttgagtagaacttagtattataaaaaaaaaaaaaaaaaaaaaaaaaaaaa

SEQ ID NO: 89 - DNA, 7071 bp, Artificial Sequence
  Synthetic sequence
ttaaaactgggtataggttgttcccacctgtaccacccacgtggtgtagtgctcctgtattccggtacacttgcacgccagtttgccctcccttcctgtaacgtagaagcaatgtaaacggaccaaaaggggacggcaaaccacgtcgttcaaggtcaagcacttctgtttccccggcatgcgaggaatagaccttctcaagggttgaagccacaagtgtcgttacccgcattggtactacacagagcctagtactgctctagaaacttattggttggtcgttcagccatttcccctggtagacctggcagatgaggcaagaagttccccactggtaacagtgttcttgcctgcgtggctgcctgcacaccctaacgggtgtgaagccaatgagtggacagggtgtgaagagccgcgtgtgctaccaatgagtcctccggcccctgaatgcggctaatccaaccccacagctatggcatgcaagccagcatgtgcgtagtcgtaatgagtaattgtgggacggaaccgactactttgggtgtccgtgtttcctttattctcttatgttttgcctatggtgacaatattaagtattaatattgctaccatgggcgcccaggtcagtagacaaaacaatggcacacatgagaatggtgtaacagctagcaatggatcagtcatcaagtatttcaacatcaattactataaagactcagcaagttctggtttgagtcgtcaagacttttctcaggacccatccaaatttacccaaccccttgtggatacactcacaaacccagcacttatgtcaccatctgttgaagcatgtggatattctgataggctcaagcaaatcactatcgggaattccacaatcacaacacaagactccctacacacagtacttgcatatggtgagtggcctacatacttatccgacattgatgcaacgtccgtcgataaacccactcacccagaaacatcagctgatagattttatactctggatagtgttgaatggcaagtaggctctcatggttggtggtggaagctgccagatgccctcaaagacatgggtgtgtttggccaaaatatgtattaccactcaatgggtagatcaggtttcataatccatacacagtgcaatgcaactaaatttcacagtggtgcactcatagtcgcggtgataccagaacaccaacttgcttatgtggggggggtgaaggtcaatgtaggatatgatcatacacacccagggcaaagtggtcatcaaatacgtgggcccagtcaatcaaatgaccggagcggtggcaaaccagatgaggacccactgtttaattgcaatggaacattgttagggaacataacaattttcccacatcaaattataaatttgaggaccaacaactccagcacaatagttgtaccttacataaattgtgtccctatggacaacatgctaaaacacaacaatctatctttagtgattatcccgttggtaccgctacgtccaggttctagtggcattaattctgtcccgattactgtaacaatagcaccctataagtcagaattctcaggtgccatggaggctcaacgccaaggcttgccaacgcgtcttcctagtggtagccaacaattcatgacaactgaggatgagcaatcacccaacattcttcctggcttccacccaagtaagaaaatacacatacctggaatgattacaaacgtgatgcacatggccagagtagattcattcatacccattaataatattcaaggagaagttggaaaagtgagtatgtactatatcacagtgacaaaaaagacagtgacagagaggatccttgttctgcccctagaaatgagcaacacactatttgctacaactcttttaggtgaagttctgaactactatgccaactggtcagggagtattaccatcacctttatgtgtgtgtgtgatgcgttcagcacaggaaagtttctcgttgcatacacaccaccaggaggtaaactaccagaagacaggaaacaagcaatgttaggtgttcacatcatatgggacttgggcctgcagtcgtcctgcaccattgtggtaccatggatttcatctggtttctaccgccgcaccaaagcagacagtttcacccacggtggatatgtctccttgtggtaccagacagcttttgtacccccagtgagtggagggacaggaagtattcttgccacctgtagtgcttgccccgacatgtccgttaggatgctgcgggatagcccaatgatggaacaaaagaatgaactgcaaaacaatgatgacccagttgagaactttgtagagtccaccctaaaagaggtgttagttgtgccagacacaaaaccctcaggacctcaacacacaacaaaaccgtcaatattgggtgccatggagattggtgcctccagtaacgcaaccccagaatccacaatagagactaggtatgtatacaacacaaatacaaatgcagaagcagatgtagaaatgttcctaggtaggtccgccctttggggtaaggtaacactcacacgccaatatgccaaatgggaaataaactttcaagaacaggcccacattaggaaaaaatttgagttcttcacttatctgaggtttgacatggaggttaccatagtaaccaacaacacagggttgatgcaaataatgttcgttccaccagggatagaccaccctgagacacatgatgacagaaaatgggattccgcttccaaccccagtgtatttttccaacctaaatcaggatttcctaggtttaccatcccatttactgggctagcttcagcatactacatgttttatgatggatatgacaagcccaaggacaatagtggtggaaatgatgtgaaaatatacgtcaaacccaaacacataacggcatgggtaccaagaccaccaagggcaacacagtacacccacaagtacagtacaaactaccattacaaacctaactctagtggacctgatgaacacgtgcttaaagacagacactttatcaaaaccagacccctcatcagctcagcgggaccgagcgacatgtttgtgcacacaagagatgcaatttataaatgtgcacatctaaccaatccaactgatgaaaccatacttctggcattgactgcagatctacaggtggatagtaccaatgttccaggccccgatgtgattccgtgttgtgattgcactgctggttgctactactctagaagcaaagacagatacttcccagtggagtgtgttagtcatgactggtatgagatacaagaatctggctactatcccaaacatatacaatataatctactcattggggaaggacactgtgaaccaggtgactgtggaggcaagttactatgcaagcatggtgtgattggtatgatcactgcaggtggtgataaccatgttgctttcactgacctacgcccatactcaagcttatcagaacaccaaggggttatttcagattacttcacccagttgggtaatgcatttggtgagggcttcacaaccaacattcaagaccacttttcacaaatcaccaagtcaatttctgacaaatttacatcaaaggctattaaatggttggtgcgcatcataagcgcccttacaattatgattagaaacaactcagacttgcctaccatacttgctactctgtcattgttggggtgtagtagctcaccatggtctttcctcaaggacaaaatctgcagctggcttcaaatccagcgtcccgcaagcaaacagagtgattcatggttgcgcaaattcacagaatgttgcaatgcagcaaaaggacttgaatggatcagtatcaagattggcaagtttattgattggctgaaagggaaactagtccccgctgtccagaggaaaagagacaccctagatagatgcaagaaaatatctctcttagaagaacaagtgaatggattcagttctgctagctcagaagcacaacaacaacttattgtagaagtggatactctaaagaagggtttagatgagctggcaccattgtatgctagtgaaaacaaaagggtgactaagattcaaaaagatctcaaacaactatcagcttatctaaagaaccataggcatgaaccagtttgcttattgttacatggcaacccaggatgtggaaaatcactagttacaaccataatcgctagaggactcacccaggaggcacaggtatactcactaccacctgatcccaaatatttcgatggttatgaccaacagcaggttgtcatattggatgatcttggacaaaatcctgatggtaaagatttaagcacattctgtcagatggtatcaacaacagatttcatagtacctatggcatcactagaggataagggtaagtctttcaccagccaatatgtgcttgccagcactaacctggacactctgtcaccaccaacagtcacaatacctgaggctataaaacggcgattctttctggatgccgatctcatcacaacatctaagttcagaaataccacaggactgctagatgtagcaaaggcactacaaccatgcacaggttgtcccaaaccagctcactataaaacgtgctgtcctctgttgtgtggcaaggcagttgtagttcaggacaggaaaacaaaagcaaatttctcagtgaacacaatagtagagcagctgaggcatgagaatgctaccaggaaaaaggttaaacacaaccttgatgcaatattccagggtcttggtgactcagaaacaccaggttttatagttgatctgctatcctcatctaaagaccccaaagttatagaatattgtgctgaacagggatggataggtaaagcaaactcaaccatagagagggattttaattatgtgcattacatgttaaattgcttaggtagtctaataattatcttagggactgtatatgcactatacaagctgatgtgtatgactcaaggaccttacactggcttaccaaacccccaaaccaaaagaccagagctcaggaaagccacactacagggccctgagcatgaattcgtcagggctttaattaaaagaaactgccatgtgataaccacctcaaaaggggagttcaacatgcttggaatccatgataactgtgcggtggtgccaacacacgctgaatgtggtgactctgtcacaattgacggcagggaagtcagggttcttaaacaatgcattctcactgacacaaatgacacagacactgaaataactctcctctggttagatcagaatgaaaaatttagggacattagaaggttcatcccagaacaccaacgcgaatggtcaaatatgcatcttgccacaaatgtaactaaattccccatgctagatgtggaggttggcactgtaataccatatggagaggtcaacctcagtggtaacccaacatgtcggcttctcaagtacaactatcctacaaagccaggacaatgtggtggtgtcattgcaaacacaggaaacatagtagcaattcatgttggcggaaatggacgtgtggggtatggagcagcattgctacgtaagtacttcgcacagtctcaaggtgagatcactgccaaacatgatgttagagaaaaaggtttgccacaaattaacacacctaataaaacaaaattacaacccagtgtattttatgatgtttttccaggggtgaaggaaccggcagccttaagcaatggagacccacggcttgaggttgatctcagtacatctgtgttaagtaagtacaaaggtaacacacaagtggaatggaatgataatatccagattgcagttgaccactactcagctcaactttacatgttagacatcaatcctcaaccattaaccatggaacaggcagtctatggcatagagcatctggaaccactagacctcaccaccagtgcaggattcccctatgtaactatgggtataaagaaaaaggatatagtcaacaaagtgacaaaggatgtaaccaaacttcaggaaatgattgacaaatatggaatagacttgccttatgtcacctatctaaaagatgaattgagagctcctgagaaaatcaagaaagggaaaacgagagcaatagaggcagctagcataaatgacacaacccacttccgcatggtgttcggtaatctcttttctgtattccatgctaacccaggtgtacttacaggctctgcagtaggctgtaaccctgatgtgttctggtctcaaatgtatgcatgtatggatggtgagttgcttgcttttgattacacaaactatgatggtagtttgcacccaatctggttcaaagcactaggtaaagtcttagacaatttgggattcccaggtcacttagtaaatagattgtgcaatacaacacacatctttaaaaacttgatttatactgtggaaggaggtatgccctctggtatctgtggcacaagtattttcaataccatgatcaataatataatcattagagtgttggttcttgaaacatacaagaatatagatctggacaagctaaaaattatagcatatggtgatgatgtagtagtgtcatacccttttgaattggatccaatggaaattgccaataaggcagtgaggtatgggttaaccatcactccaccagacaagggcagtacatttcataagattgattggacaaatgtcacctttctcaaaaggcatttcaaaccagacaccaaatacaaatttctgatacatccagtatacaagatggaggacatctatgaatcaattagatggacaaaggacccaaagaacacacaagaccatgttcactcattgtgtctacttgcatggcacaacggagaggaggtctatgaaaagtttagggagaaaatcagatctacaagtgttggtaaggttctctacacccctccttactcattgttgtacaggcaatggatagatcaattcatataaacaaataatataatacaatgtttgagtagaacttagtattataaaaaaaaaaaaaaaaaaaaaaaaaaaaa

SEQ ID NO: 90 - DNA, 7070 bp, Artificial Sequence
  Synthetic sequence
ttaaaactgggtataggttgttcccacctgtaccacccacgtggtgtagtgctcctgtattccggtacacttgcacgccagtttgccctcccttcctgtaacgtagaagcaatgtaaacggaccaaaaggggacggcaaaccacgtcgttcaaggtcaagcacttctgtttccccggcatgcgaggaatagaccttctcaagggttgaagccacaagtgtcgttacccgcattggtactacacagagcctagtactgctctagaaacttattggttggtcgttcagccatttcccctggtagacctggcagatgaggcaagaagttccccactggtaacagtgttcttgcctgcgtggctgcctgcacaccctaacgggtgtgaagccaatgagtggacagggtgtgaagagccgcgtgtgctaccaatgagtcctccggcccctgaatgcggctaatccaaccccacagctatggcatgcaagccagcatgtgcgtagtcgtaatgagtaattgtgggacggaaccgactactttgggtgtccgtgtttcctttattctcttatgttttgcctatggtgacaatattaagtattaatattgctaccatgggcgcccaggtcagtagacaaaacaatggcacacatgagaatggtgtaacagctagcaatggatcagtcatcaagtatttcaacatcaattactataaagactcagcaagttctggtttgagtcgtcaagacttttctcaggacccatccaaatttacccaaccccttgtggatacactcacaaacccagcacttatgtcaccatctgttgaagcatgtggatattctgataggctcaagcaaatcactatcgggaattccacaatcacaacacaagactccctacacacagtacttgcatatggtgagtggcctacatacttatccgacattgatgcaacgtccgtcgataaacccactcacccagaaacatcagctgatagattttatactctggatagtgttgaatggcaagtaggctctcatggttggtggtggaagctgccagatgccctcaaagacatgggtgtgtttggccaaaatatgtattaccactcaatgggtagatcaggtttcataatccatacacagtgcaatgcaactaaatttcacagtggtgcactcatagtcgcggtgataccagaacaccaacttgcttatgtggggggggtgaaggtcaatgtaggatatgatcatacacacccagggcaaagtggtcatcaaatacgtgggcccagtcaatcaaatgaccggagcggtggcaaaccagatgaggacccactgtttaattgcaatggaacattgttagggaacataacaattttcccacatcaaattataaatttgaggaccaacaactccagcacaatagttgtaccttacataaattgtgtccctatggacaacatgctaaaacacaacaatctatctttagtgattatcccgttggtaccgctacgtccaggttctagtggcattaattctgtcccgattactgtaacaatagcaccctataagtcagaattctcaggtgccatggaggctcaacgccaaggcttgccaacgcgtcttcctagtggtagccaacaattcatgacaactgaggatgagcaatcacccaacattcttcctggcttccacccaagtaagaaaatacacatacctggaatgattacaaacgtgatgcacatggccagagtagattcattcatacccattaataatattcaaggagaagttggaaaagtgagtatgtactatatcacagtgacaaaaaagacagtgacagagaggatccttgttctgcccctagaaatgagcaacacactatttgctacaactcttttaggtgaagttctgaactactatgccaactggtcagggagtattaccatcacctttatgtgtgtgtgtgatgcgttcagcacaggaaagtttctcgttgcatacacaccaccaggaggtaaactaccagaagacaggaaacaagcaatgttaggtgttcacatcatatgggacttgggcctgcagtcgtcctgcaccattgtggtaccatggatttcatctggtttctaccgccgcaccaaagcagacagtttcacccacggtggatatgtctccttgtggtaccagacagcttttgtacccccagtgagtggagggacaggaagtattcttgccacctgtagtgcttgccccgacatgtccgttaggatgctgcgggatagcccaatgatggaacaaaagaatgaactgcaaaacaatgatgacccagttgagaactttgtagagtccaccctaaaagaggtgttagttgtgccagacacaaaaccctcaggacctcaacacacaacaaaaccgtcaatattgggtgccatggagattggtgcctccagtaacgcaaccccagaatccacaatagagactaggtatgtatacaacacaaatacaaatgcagaagcagatgtagaaatgttcctaggtaggtccgccctttggggtaaggtaacactcacacgccaatatgccaaatgggaaataaactttcaagaacaggcccacattaggaaaaaatttgagttcttcacttatctgaggtttgacatggaggttaccatagtaaccaacaacacagggttgatgcaaataatgttcgttccaccagggatagaccaccctgagacacatgatgacagaaaatgggattccgcttccaaccccagtgtatttttccaacctaaatcaggatttcctaggtttaccatcccatttactgggctagcttcagcatactacatgttttatgatggatatgacaagcccaagacaatagtggtggaaatgatgtgaaaatatacgtcaaacccaaacacataacggcatgggtaccaagaccaccaagggcaacacagtacacccacaagtacagtacaaactaccattacaaacctaactctagtggacctgatgaacacgtgcttaaagacagacactttatcaaaaccagacccctcatcagctcagcgggaccgagcgacatgtttgtgcacacaagagatgcaatttataaatgtgcacatctaaccaatccaactgatgaaaccatacttctggcattgactgcagatctacaggtggatagtaccaatgttccaggccccgatgtgattccgtgttgtgattgcactgctggttgctactactctagaagcaaagacagatacttcccagtggagtgtgttagtcatgactggtatgagatacaagaatctggctactatcccaaacatatacaatataatctactcattggggaaggacactgtgaaccaggtgactgtggaggcaagttactatgcaagcatggtgtgattggtatgatcactgcaggtggtgataaccatgttgctttcactgacctacgcccatactcaagcttatcagaacaccaaggggttatttcagattacttcacccagttgggtaatgcatttggtgagggcttcacaaccaacattcaagaccacttttcacaaatcaccaagtcaatttctgacaaatttacatcaaaggctattaaatggttggtgcgcatcataagcgcccttacaattatgattagaaacaactcagacttgcctaccatacttgctactctgtcattgttggggtgtagtagctcaccatggtctttcctcaaggacaaaatctgcagctggcttcaaatccagcgtcccgcaagcaaacagagtgattcatggttgcgcaaattcacagaatgttgcaatgcagcaaaaggacttgaatggatcagtatcaagattggcaagtttattgattggctgaaagggaaactagtccccgctgtccagaggaaaagagacaccctagatagatgcaagaaaatatctctcttagaagaacaagtgaatggattcagttctgctagctcagaagcacaacaacaacttattgtagaagtggatactctaaagaagggtttagatgagctggcaccattgtatgctagtgaaaacaaaagggtgactaagattcaaaaagatctcaaacaactatcagcttatctaaagaaccataggcatgaaccagtttgcttattgttacatggcaacccaggatgtggaaaatcactagttacaaccataatcgctagaggactcacccaggaggcacaggtatactcactaccacctgatcccaaatatttcgatggttatgaccaacagcaggttgtcatattggatgatcttggacaaaatcctgatggtaaagatttaagcacattctgtcagatggtatcaacaacagatttcatagtacctatggcatcactagaggataagggtaagtctttcaccagccaatatgtgcttgccagcactaacctggacactctgtcaccaccaacagtcacaatacctgaggctataaaacggcgattctttctggatgccgatctcatcacaacatctaagttcagaaataccacaggactgctagatgtagcaaaggcactacaaccatgcacaggttgtcccaaaccagctcactataaaacgtgctgtcctctgttgtgtggcaaggcagttgtagttcaggacaggaaaacaaaagcaaatttctcagtgaacacaatagtagagcagctgaggcatgagaatgctaccaggaaaaaggttaaacacaaccttgatgcaatattccagggtcttggtgactcagaaacaccaggttttatagttgatctgctatcctcatctaaagaccccaaagttatagaatattgtgctgaacagggatggataggtaaagcaaactcaaccatagagagggattttaattatgtgcattacatgttaaattgcttaggtagtctaataattatcttagggactgtatatgcactatacaagctgatgtgtatgactcaaggaccttacactggcttaccaaacccccaaaccaaaagaccagagctcaggaaagccacactacagggccctgagcatgaattcgtcagggctttaattaaaagaaactgccatgtgataaccacctcaaaaggggagttcaacatgcttggaatccatgataactgtgcggtggtgccaacacacgctgaatgtggtgactctgtcacaattgacggcagggaagtcagggttcttaaacaatgcattctcactgacacaaatgacacagacactgaaataactctcctctggttagatcagaatgaaaaatttagggacattagaaggttcatcccagaacaccaacgcgaatggtcaaatatgcatcttgccacaaatgtaactaaattccccatgctagatgtggaggttggcactgtaataccatatggagaggtcaacctcagtggtaacccaacatgtcggcttctcaagtacaactatcctacaaagccaggacaatgtggtggtgtcattgcaaacacaggaaacatagtagcaattcatgttggcggaaatggacgtgtggggtatggagcagcattgctacgtaagtacttcgcacagtctcaaggtgagatcactgccaaacatgatgttagagaaaaaggtttgccacaaattaacacacctaataaaacaaaattacaacccagtgtattttatgatgtttttccaggggtgaaggaaccggcagccttaagcaatggagacccacggcttgaggttgatctcagtacatctgtgttaagtaagtacaaaggtaacacacaagtggaatggaatgataatatccagattgcagttgaccactactcagctcaactttacatgttagacatcaatcctcaaccattaaccatggaacaggcagtctatggcatagagcatctggaaccactagacctcaccaccagtgcaggattcccctatgtaactatgggtataaagaaaaaggatatagtcaacaaagtgacaaaggatgtaaccaaacttcaggaaatgattgacaaatatggaatagacttgccttatgtcacctatctaaaagatgaattgagagctcctgagaaaatcaagaaagggaaaacgagagcaatagaggcagctagcataaatgacacaacccacttccgcatggtgttcggtaatctcttttctgtattccatgctaacccaggtgtacttacaggctctgcagtaggctgtaaccctgatgtgttctggtctcaaatgtatgcatgtatggatggtgagttgcttgcttttgattacacaaactatgatggtagtttgcacccaatctggttcaaagcactaggtaaagtcttagacaatttgggattcccaggtcacttagtaaatagattgtgcaatacaacacacatctttaaaaacttgatttatactgtggaaggaggtatgccctctggtatctgtggcacaagtattttcaataccatgatcaataatataatcattagagtgttggttcttgaaacatacaagaatatagatctggacaagctaaaaattatagcatatggtgatgatgtagtagtgtcatacccttttgaattggatccaatggaaattgccaataaggcagtgaggtatgggttaaccatcactccaccagacaagggcagtacatttcataagattgattggacaaatgtcacctttctcaaaaggcatttcaaaccagacaccaaatacaaatttctgatacatccagtatacaagatggaggacatctatgaatcaattagatggacaaaggacccaaagaacacacaagaccatgttcactcattgtgtctacttgcatggcacaacggagaggaggtctatgaaaagtttagggagaaaatcagatctacaagtgttggtaaggttctctacacccctccttactcattgttgtacaggcaatggatagatcaattcatataaacaaataatataatacaatgtttgagtagaacttagtattataaaaaaaaaaaaaaaaaaaaaaaaaaaaa

SEQ ID NO: 91 - DNA, 6945 bp, Artificial Sequence
  Synthetic sequence
ttaaaactgggtataggttgttcccacctgtaccacccacgtggtgtagtgctcctgtattccggtacacttgcacgccagtttgccctcccttcctgtaacgtagaagcaatgtaaacggaccaaaaggggacggcaaaccacgtcgttcaaggtcaagcacttctgtttccccggcatgcgaggaatagaccttctcaagggttgaagccacaagtgtcgttacccgcattggtactacacagagcctagtactgctctagaaacttattggttggtcgttcagccatttcccctggtagacctggcagatgaggcaagaagttccccactggtaacagtgttcttgcctgcgtggctgcctgcacaccctaacgggtgtgaagccaatgagtggacagggtgtgaagagccgcgtgtgctaccaatgagtcctccggcccctgaatgcggctaatccaaccccacagctatggcatgcaagccagcatgtgcgtagtcgtaatgagtaattgtgggacggaaccgactactttgggtgtccgtgtttcctttattctcttatgttttgcctatggtgacaatattaagtattaatattgctaccatgggcgcccaggtcagtagacaaaacaatggcacacatgagaatggtgtaacagctagcaatggatcagtcatcaagtatttcaacatcaattactataaagactcagcaagttctggtttgagtcgtcaagacttttctcaggacccatccaaatttacccaaccccttgtggatacactcacaaacccagcacttatgtcaccatctgttgaagcatgtggatattctgataggctcaagcaaatcactatcgggaattccacaatcacaacacaagactccctacacacagtacttgcatatggtgagtggcctacatacttatccgacattgatgcaacgtccgtcgataaacccactcacccagaaacatcagctgatagattttatactctggatagtgttgaatggcaagtaggctctcatggttggtggtggaagctgccagatgccctcaaagacatgggtgtgtttggccaaaatatgtattaccactcaatgggtagatcaggtttcataatccatacacagtgcaatgcaactaaatttcacagtggtgcactcatagtcgcggtgataccagaacaccaacttgcttatgtggggggggtgaaggtcaatgtaggatatgatcatacacacccagggcaaagtggtcatcaaatacgtgggcccagtcaatcaaatgaccggagcggtggcaaaccagatgaggacccactgtttaattgcaatggaacattgttagggaacataacaattttcccacatcaaattataaatttgaggaccaacaactccagcacaatagttgtaccttacataaattgtgtccctatggacaacatgctaaaacacaacaatctatctttagtgattatcccgttggtaccgctacgtccaggttctagtggcattaattctgtcccgattactgtaacaatagcaccctataagtcagaattctcaggtgccatggaggctcaacgccaaggcttgccaacgcgtcttcctagtggtagccaacaattcatgacaactgaggatgagcaatcacccaacattcttcctggcttccacccaagtaagaaaatacacatacctggaatgattacaaacgtgatgcacatggccagagtagattcattcatacccattaataatattcaaggagaagttggaaaagtgagtatgtactatatcacagtgacaaaaaagacagtgacagagaggatccttgttctgcccctagaaatgagcaacacactatttgctacaactcttttaggtgaagttctgaactactatgccaactggtcagggagtattaccatcacctttatgtgtgtgtgtgatgcgttcagcacaggaaagtttctcgttgcatacacaccaccaggaggtaaactaccagaagacaggaaacaagcaatgttaggtgttcacatcatatgggacttgggcctgcagtcgtcctgcaccattgtggtaccatggatttcatctggtttctaccgccgcaccaaagcagacagtttcacccacggtggatatgtctccttgtggtaccagacagcttttgtacccccagtgagtggagggacaggaagtattcttgccacctgtagtgcttgccccgacatgtccgttaggatgctgcgggatagcccaatgatggaacaaaagaatgaactgcaaaacaatgatgacccagttgagaactttgtagagtccaccctaaaagaggtgttagttgtgccagacacaaaaccctcaggacctcaacacacaacaaaaccgtcaatattgggtgccatggagattggtgcctccagtaacgcaaccccagaatccacaatagagactaggtatgtatacaacacaaatacaaatgcagaagcagatgtagaaatgttcctaggtaggtccgccctttggggtaaggtaacactcacacgccaatatgccaaatgggaaataaactttcaagaacaggcccacattaggaaaaaatttgagttcttcacttatctgaggtttgacatggaggttaccatagtaaccaacaacacagggttgatgcaaataatgttcgttccaccagggatagaccaccctgagacacatgatgacagaaaatgggattccgcttccaaccccagtgtatttttccaacctaaatcaggatttcctaggtttaccatcccatttactgggctagcttcagcatactacatgttttatgatggatatgacaagcccaagggttcagacaacaatgaatatggaattgctcccaccaatgacatgggtttgttatgcttcaggactttggacaatagtggtggaaatgatgtgaaaatatacgtcaaacccaaacacataacggcatgggtaccaagaccaccaagggcaacacagtacacccacaagtacagtacaaactaccattacaaacctaactctagtggacctgatgaacacgtgcttaaagacagacactttatcaaaaccagacccctcatcagctcagcgggaccgagcgacatgtttgtgcacacaagagatgcaatttataaatgtgcacatctaaccaatccaactgatgaaaccatacttctggcattgactgcagatctacaggtgggtgactgtggaggcaagttactatgcaagcatggtgtgattggtatgatcactgcaggtggtgataaccatgttgctttcactgacctacgcccatactcaagcttatcagaacaccaaggggttatttcagattacttcacccagttgggtaatgcatttggtgagggcttcacaaccaacattcaagaccacttttcacaaatcaccaagtcaatttctgacaaatttacatcaaaggctattaaatggttggtgcgcatcataagcgcccttacaattatgattagaaacaactcagacttgcctaccatacttgctactctgtcattgttggggtgtagtagctcaccatggtctttcctcaaggacaaaatctgcagctggcttcaaatccagcgtcccgcaagcaaacagagtgattcatggttgcgcaaattcacagaatgttgcaatgcagcaaaaggacttgaatggatcagtatcaagattggcaagtttattgattggctgaaagggaaactagtccccgctgtccagaggaaaagagacaccctagatagatgcaagaaaatatctctcttagaagaacaagtgaatggattcagttctgctagctcagaagcacaacaacaacttattgtagaagtggatactctaaagaagggtttagatgagctggcaccattgtatgctagtgaaaacaaaagggtgactaagattcaaaaagatctcaaacaactatcagcttatctaaagaaccataggcatgaaccagtttgcttattgttacatggcaacccaggatgtggaaaatcactagttacaaccataatcgctagaggactcacccaggaggcacaggtatactcactaccacctgatcccaaatatttcgatggttatgaccaacagcaggttgtcatattggatgatcttggacaaaatcctgatggtaaagatttaagcacattctgtcagatggtatcaacaacagatttcatagtacctatggcatcactagaggataagggtaagtctttcaccagccaatatgtgcttgccagcactaacctggacactctgtcaccaccaacagtcacaatacctgaggctataaaacggcgattctttctggatgccgatctcatcacaacatctaagttcagaaataccacaggactgctagatgtagcaaaggcactacaaccatgcacaggttgtcccaaaccagctcactataaaacgtgctgtcctctgttgtgtggcaaggcagttgtagttcaggacaggaaaacaaaagcaaatttctcagtgaacacaatagtagagcagctgaggcatgagaatgctaccaggaaaaaggttaaacacaaccttgatgcaatattccagggtcttggtgactcagaaacaccaggttttatagttgatctgctatcctcatctaaagaccccaaagttatagaatattgtgctgaacagggatggataggtaaagcaaactcaaccatagagagggattttaattatgtgcattacatgttaaattgcttaggtagtctaataattatcttagggactgtatatgcactatacaagctgatgtgtatgactcaaggaccttacactggcttaccaaacccccaaaccaaaagaccagagctcaggaaagccacactacagggccctgagcatgaattcgtcagggctttaattaaaagaaactgccatgtgataaccacctcaaaaggggagttcaacatgcttggaatccatgataactgtgcggtggtgccaacacacgctgaatgtggtgactctgtcacaattgacggcagggaagtcagggttcttaaacaatgcattctcactgacacaaatgacacagacactgaaataactctcctctggttagatcagaatgaaaaatttagggacattagaaggttcatcccagaacaccaacgcgaatggtcaaatatgcatcttgccacaaatgtaactaaattccccatgctagatgtggaggttggcactgtaataccatatggagaggtcaacctcagtggtaacccaacatgtcggcttctcaagtacaactatcctacaaagccaggacaatgtggtggtgtcattgcaaacacaggaaacatagtagcaattcatgttggcggaaatggacgtgtggggtatggagcagcattgctacgtaagtacttcgcacagtctcaaggtgagatcactgccaaacatgatgttagagaaaaaggtttgccacaaattaacacacctaataaaacaaaattacaacccagtgtattttatgatgtttttccaggggtgaaggaaccggcagccttaagcaatggagacccacggcttgaggttgatctcagtacatctgtgttaagtaagtacaaaggtaacacacaagtggaatggaatgataatatccagattgcagttgaccactactcagctcaactttacatgttagacatcaatcctcaaccattaaccatggaacaggcagtctatggcatagagcatctggaaccactagacctcaccaccagtgcaggattcccctatgtaactatgggtataaagaaaaaggatatagtcaacaaagtgacaaaggatgtaaccaaacttcaggaaatgattgacaaatatggaatagacttgccttatgtcacctatctaaaagatgaattgagagctcctgagaaaatcaagaaagggaaaacgagagcaatagaggcagctagcataaatgacacaacccacttccgcatggtgttcggtaatctcttttctgtattccatgctaacccaggtgtacttacaggctctgcagtaggctgtaaccctgatgtgttctggtctcaaatgtatgcatgtatggatggtgagttgcttgcttttgattacacaaactatgatggtagtttgcacccaatctggttcaaagcactaggtaaagtcttagacaatttgggattcccaggtcacttagtaaatagattgtgcaatacaacacacatctttaaaaacttgatttatactgtggaaggaggtatgccctctggtatctgtggcacaagtattttcaataccatgatcaataatataatcattagagtgttggttcttgaaacatacaagaatatagatctggacaagctaaaaattatagcatatggtgatgatgtagtagtgtcatacccttttgaattggatccaatggaaattgccaataaggcagtgaggtatgggttaaccatcactccaccagacaagggcagtacatttcataagattgattggacaaatgtcacctttctcaaaaggcatttcaaaccagacaccaaatacaaatttctgatacatccagtatacaagatggaggacatctatgaatcaattagatggacaaaggacccaaagaacacacaagaccatgttcactcattgtgtctacttgcatggcacaacggagaggaggtctatgaaaagtttagggagaaaatcagatctacaagtgttggtaaggttctctacacccctccttactcattgttgtacaggcaatggatagatcaattcatataaacaaataatataatacaatgtttgagtagaacttagtattataaaaaaaaaaaaaaaaaaaaaaaaaaaaa

SEQ ID NO: 92 - DNA, 7088 bp, Artificial Sequence
  Synthetic sequence
ttaaaactgggtataggttgttcccacctgtaccacccacgtggtgtagtgctcctgtattccggtacacttgcacgccagtttgccctcccttcctgtaacgtagaagcaatgtaaacggaccaaaaggggacggcaaaccacgtcgttcaaggtcaagcacttctgtttccccggcatgcgaggaatagaccttctcaagggttgaagccacaagtgtcgttacccgcattggtactacacagagcctagtactgctctagaaacttattggttggtcgttcagccatttcccctggtagacctggcagatgaggcaagaagttccccactggtaacagtgttcttgcctgcgtggctgcctgcacaccctaacgggtgtgaagccaatgagtggacagggtgtgaagagccgcgtgtgctaccaatgagtcctccggcccctgaatgcggctaatccaaccccacagctatggcatgcaagccagcatgtgcgtagtcgtaatgagtaattgtgggacggaaccgactactttgggtgtccgtgtttcctttattctcttatgttttgcctatggtgacaatattaagtattaatattgctaccatgggcgcccaggtcagtagacaaaacaatggcacacatgagaatggtgtaacagctagcaatggatcagtcatcaagtatttcaacatcaattactataaagactcagcaagttctggtttgagtcgtcaagacttttctcaggacccatccaaatttacccaaccccttgtggatacactcacaaacccagcacttatgtcaccatctgttgaagcatgtggatattctgataggctcaagcaaatcactatcgggaattccacaatcacaacacaagactccctacacacagtacttgcatatggtgagtggcctacatacttatccgacattgatgcaacgtccgtcgataaacccactcacccagaaacatcagctgatagattttatactctggatagtgttgaatggcaagtaggctctcatggttggtggtggaagctgccagatgccctcaaagacatgggtgtgtttggccaaaatatgtattaccactcaatgggtagatcaggtttcataatccatacacagtgcaatgcaactaaatttcacagtggtgcactcatagtcgcggtgataccagaacaccaacttgcttatgtggggggggtgaaggtcaatgtaggatatgatcatacacacccagggcaaagtggtcatcaaatacgtgggcccagtcaatcaaatgaccggagcggtggcaaaccagatgaggacccactgtttaattgcaatggaacattgttagggaacataacaattttcccacatcaaattataaatttgaggaccaacaactccagcacaatagttgtaccttacataaattgtgtccctatggacaacatgctaaaacacaacaatctatctttagtgattatcccgttggtaccgctacgtccaggttctagtggcattaattctgtcccgattactgtaacaatagcaccctataagtcagaattctcaggtgccatggaggctcaacgccaaggcttgccaacgcgtcttcctagtggtagccaacaattcatgacaactgaggatgagcaatcacccaacattcttcctggcttccacccaagtaagaaaatacacatacctggaatgattacaaacgtgatgcacatggccagagtagattcattcatacccattaataatattcaaggagaagttggaaaagtgagtatgtactatatcacagtgacaaaaaagacagtgacagagaggatccttgttctgcccctagaaatgagcaacacactatttgctacaactcttttaggtgaagttctgaactactatgccaactggtcagggagtattaccatcacctttatgtgtgtgtgtgatgcgttcagcacaggaaagtttctcgttgcatacacaccaccaggaggtaaactaccagaagacaggaaacaagcaatgttaggtgttcacatcatatgggacttgggcctgcagtcgtcctgcaccattgtggtaccatggatttcatctggtttctaccgccgcaccaaagcagacagtttcacccacggtggatatgtctccttgtggtaccagacagcttttgtacccccagtgagtggagggacaggaagtattcttgccacctgtagtgcttgccccgacatgtccgttaggatgctgcgggatagcccaatgatggaacaaaagaatgaactgcaaaacaatgatgacccagttgagaactttgtagagtccaccctaaaagaggtgttagttgtgccagacacaaaaccctcaggacctcaacacacaacaaaaccgtcaatattgggtgccatggagattggtgcctccagtaacgcaaccccagaatccacaatagagactaggtatgtatacaacacaaatacaaatgcagaagcagatgtagaaatgttcctaggtaggtccgccctttggggtaaggtaacactcacacgccaatatgccaaatgggaaataaactttcaagaacaggcccacattaggaaaaaatttgagttcttcacttatctgaggtttgacatggaggttaccatagtaaccaacaacacagggttgatgcaaataatgttcgttccaccagggatagaccaccctgagacacatgatgacagaaaatgggattccgcttccaaccccagtgtatttttccaacctaaatcaggatttcctaggtttaccatcccatttactgggctagcttcagcatactacatgttttatgatggatatgacaagcccaagggttcagacaacaatgaatatggaattgctcccaccaatgacatgggtttgttatgcttcaggactttggacaatagtggtggaaatgatgtgaaaatatacgtcaaacccaaacacataacggcatgggtaccaagaccaccaagggcaacacagtacacccacaagtacagtacaaactaccattacaaacctaactctagtggacctgatgaacacgtgcttaaagacagacactttatcaaaaccagacccctcatcagctcagcgggaccgagcgacatgtttgtgcacacaagagatgcaatttataaatgtgcacatctaaccaatccaactgatgaaaccatacttctggcattgactgcagatctacaggtggatagtaccaatgttccaggccccgatgtgattccgtgttgtgattgcactgctggttgctactactctagaagcaaagacagatacttcccagtggagtgtgttagtcatgactggtatgagatacaagaatctggctactatcccaaacatatacaatataatctactcattggggaaggacactgtgaaccaggtgactgtggaggcaagttactatgcaagcatggtgtgattggtatgatcactgcaggtggtgataaccatgttgctttcactgacctacgcccatactcaagcttatcagaacaccaaggggttatttcagattacttcacccagttgggtaatgcatttggtgagggcttcacaaccaacattcaagaccacttttcacaaatcaccaagtcaatttctgacaaatttacatcaaaggctattaaatggttggtgcgcatcataagcgcccttacaattatgattagaaacaactcagacttgcctaccatacttgctactctgtcattgttggggtgtagtagctcaccatggtctttcctcaaggacaaaatctgcagctggcttcaaatccagcgtcccgcaagcaaacagagtgattcatggttgcgcaaattcacagaatgttgcaatgcagcaaaaggacttgaatggatcagtatcaagattggcaagtttattgattggctgaaagggaaactagtccccgctgtccagaggaaaagagacaccctagatagatgcaagaaaatatctctcttagaagaacaagtgaatggattcagttctgctagctcagaagcacaacaacaacttattgtagaagtggatactctaaagaagggtttagatgagctggcaccattgtatgctagtgaaaacaaaagggtgactaagattcaaaaagatctcaaacaactatcagcttatctaaagaaccataggcatgaaccagtttgcttattgttacatggcaacccaggatgtggaaaatcactagttacaaccataatcgctagaggactcacccaggaggcacaggtatactcactaccacctgatcccaaatatttcgatggttatgaccaacagcaggttgtcatattggatgatcttggacaaaatcctgatggtaaagatttaagcacattctgtcagatggtatcaacaacagatttcatagtacctatggcatcactagaggataagggtaagtctttcaccagccaatatgtgcttgccagcactaacctggacactctgtcaccaccaacagtcacaatacctgaggctataaaacggcgattctttctggatgccgatctcatcacaacatctaagttcagaaataccacaggactgctagatgtagcaaaggcactacaaccatgcacaggttgtcccaaaccagctcactataaaacgtgctgtctttctcagtgaacacaatagtagagcagctgaggcatgagaatgctaccaggaaaaaggttaaacacaaccttgatgcaatattccagggtcttggtgactcagaaacaccaggttttatagttgatctgctatcctcatctaaagaccccaaagttatagaatattgtgctgaacagggatggataggtaaagcaaactcaaccatagagagggattttaattatgtgcattacatgttaaattgcttaggtagtctaataattatcttagggactgtatatgcactatacaagctgatgtgtatgactcaaggaccttacactggcttaccaaacccccaaaccaaaagaccagagctcaggaaagccacactacagggccctgagcatgaattcgtcagggctttaattaaaagaaactgccatgtgataaccacctcaaaaggggagttcaacatgcttggaatccatgataactgtgcggtggtgccaacacacgctgaatgtggtgactctgtcacaattgacggcagggaagtcagggttcttaaacaatgcattctcactgacacaaatgacacagacactgaaataactctcctctggttagatcagaatgaaaaatttagggacattagaaggttcatcccagaacaccaacgcgaatggtcaaatatgcatcttgccacaaatgtaactaaattccccatgctagatgtggaggttggcactgtaataccatatggagaggtcaacctcagtggtaacccaacatgtcggcttctcaagtacaactatcctacaaagccaggacaatgtggtggtgtcattgcaaacacaggaaacatagtagcaattcatgttggcggaaatggacgtgtggggtatggagcagcattgctacgtaagtacttcgcacagtctcaaggtgagatcactgccaaacatgatgttagagaaaaaggtttgccacaaattaacacacctaataaaacaaaattacaacccagtgtattttatgatgtttttccaggggtgaaggaaccggcagccttaagcaatggagacccacggcttgaggttgatctcagtacatctgtgttaagtaagtacaaaggtaacacacaagtggaatggaatgataatatccagattgcagttgaccactactcagctcaactttacatgttagacatcaatcctcaaccattaaccatggaacaggcagtctatggcatagagcatctggaaccactagacctcaccaccagtgcaggattcccctatgtaactatgggtataaagaaaaaggatatagtcaacaaagtgacaaaggatgtaaccaaacttcaggaaatgattgacaaatatggaatagacttgccttatgtcacctatctaaaagatgaattgagagctcctgagaaaatcaagaaagggaaaacgagagcaatagaggcagctagcataaatgacacaacccacttccgcatggtgttcggtaatctcttttctgtattccatgctaacccaggtgtacttacaggctctgcagtaggctgtaaccctgatgtgttctggtctcaaatgtatgcatgtatggatggtgagttgcttgcttttgattacacaaactatgatggtagtttgcacccaatctggttcaaagcactaggtaaagtcttagacaatttgggattcccaggtcacttagtaaatagattgtgcaatacaacacacatctttaaaaacttgatttatactgtggaaggaggtatgccctctggtatctgtggcacaagtattttcaataccatgatcaataatataatcattagagtgttggttcttgaaacatacaagaatatagatctggacaagctaaaaattatagcatatggtgatgatgtagtagtgtcatacccttttgaattggatccaatggaaattgccaataaggcagtgaggtatgggttaaccatcactccaccagacaagggcagtacatttcataagattgattggacaaatgtcacctttctcaaaaggcatttcaaaccagacaccaaatacaaatttctgatacatccagtatacaagatggaggacatctatgaatcaattagatggacaaaggacccaaagaacacacaagaccatgttcactcattgtgtctacttgcatggcacaacggagaggaggtctatgaaaagtttagggagaaaatcagatctacaagtgttggtaaggttctctacacccctccttactcattgttgtacaggcaatggatagatcaattcatataaacaaataatataatacaatgtttgagtagaacttagtattataaaaaaaaaaaaaaaaaaaaaaaaaaaaa

SEQ ID NO: 93 - DNA, 8872 bp, Artificial Sequence
  Synthetic sequence
agtaaatcctgtgtgctaattgaggtgcattggtctgcaaatcgagttgctaggcaataaacacatttggattaattttaatcgttcgttgagcgattagcagagaactgaccagaacatgtctggtcgtaaagctcagggaaaaaccctgggcgtcaatatggtacgacgaggagttcgctccttgtcaaacaaaataaaacaaaaaacaaaacaaattggaaacagacctggaccttcaagaggtgttcaaggatttatctttttctttttgttcaacattttgactggaaaaaagatcacagcccacctaaagaggttgtggaaaatgctggacccaagacaaggcttggctgttctaaggaaagtcaagagagttggcatcaacacaagaaacatgacaatgtccatgagcatgatcttggtaggagtgatcatgatgtttttgtctctaggagttggggcggatcaaggatgcgccatcaactttggcaagagagagctcaagtgcggagatggtatcttcatatttagagactctgatgactggctgaacaagtactcatactatccagaagatcctgtgaagctggcatcaatagtgaaagcctcttttgaagaagggaagtgtggcctaaattcagttgactcccttgagcatgagatgtggagaagcagggcagatgagatcaatgccattcttgaggaaaacgaggtggacatttctgttgtcgtgcaggatccaaagaatgtttaccagagaggaactcatccattttccagaattcgggatggtctgcagtatggttggaagacttggggtaagaaccttgtgttctccccagggaggaagaatggaagcttcatcatagatggaaagtccaggaaagaatgcccgttttcaaaccgggtctggaattctttccagatagaggagtttgggacgggagtgttcaccacacgcgtgtacatggacgcagtctttgaatacaccatagactgcgatggatctatcttgggtgcagcggtgaacggaaaaaagagtgcccatggctctccaacattttggatgggaagtcatgaagtaaatgggacatggatgatccacaccttggaggcattagattacaaggagtgtgagtggccactgacacatacgattggaacatcagttgaagagagtgaaatgttcatgccgagatcaatcggaggcccagttagctctcacaatcatatccctggatacaaggttcagacgaacggaccttggatgcaggtaccactagaggtgaagagagaagcttgcccagggactagcgtgatcattgatggcaactgtgatggacggggaaaatcaaccagatccaccacggatagcgggaaaattattcctgaatggtgttgccgctcctgcacaatgccgcctgtgagcttccatggtagtgatgggtgttggtatcccatggaaattaggccaaggaaaacgcatgaaagccatctggtgcgctcctgggttacagctggagaaatacatgctgtcccttttggtttggtgagcatgatgatagcaatggaagtggtcctaaggaaaagacagggaccaaagcaaatgttggttggaggagtggtgctcttgggagcaatgctggtcgggcaagtaactctccttgatttgctgaaactcacagtggctgtgggattgcatttccatgagatgaacaatggaggagacgccatgtatatggcgttgattgctgccttttcaatcagaccagggctgctcatcggctttgggctcaggaccctatggagccctcgggaacgccttgtgctgaccctaggagcagccatggtggagattgccttgggtggcatgatgggcggcctgtggaagtatctaaatgcagtttctctctgcatcctgacaataaatgctgttgcttctaggaaagcatcaaataccatcttgcccctcatggctctgttgacacctgtcactatggctgaggtgagacttgccacaatgctcttttgtaccgtggttatcataggggtccttcaccagaactccaaggacacctccatgcagaagactatacctctggtggccctcacactcacatcttacctgggcttgacacaaccttttttgggcctgtgtgcatttctggcaacccgcatatttgggcgaaggagtatcccagtgaatgaggcactcgcagcagctggtctagtgggagtgctggcaggactggcttttcaggagatggagaacttccttggtccgattgcagttggaggaatcctgatgatgctggttagcgtggctgggagggtggatgggctagagctcaagaagcttggtgaagtttcatgggaagaggaggcggagatcagcggaagttccgcccgctatgatgtggcactcagtgaacaaggggagttcaagctgctttctgaagagaaagtgccatgggaccaggttgtgatgacctcgctggccttggttggggctgccattcatccatttgctcttctgctggtccttgctgggtggctgtttcatgtcaggggagctaggagaagtggggatgtcttgtgggatattcccactcctaagatcattgaggaatgtgaacatctggaggatgggatttatggcatattccagtcaaccttcttgggggcctcccagcgaggagtgggagtggcacagggaggggtgttccacacaatgtggcatgtcacaagaggagctttccttgtcaggaatggcaagaagttgattccatcttgggcttcagtaaaggaagaccttgtcgcctatggtggctcatggaagttggaaggcagatgggatggagaggaagaggtccaattgatcgctgctgttccaggaaagaacgtggtcaacgtccagacaaaaccgagcttgttcaaagtgaggaatgggggagaaatcggggctgtcgctcttgactatccgagtggcacttcaggatctcctattgttaacaggaacggagaggtgattgggctgtacggcaatggcatccttgtcggtgacaactccttcgtgtccgccatatcccagactgaggtgaaggaagaaggaaaggaggagctccaagagatcccgacaatgctaaagaaaggaatgacaactatccttgattttcatcctggagctgggaagacaagacgttttctcccacagatcttggccgagtgcgcacggagacgcttgcgcactcttgtgttggcccccaccagggttgttctttctgaaatgaaggaggcttttcacggcctggacgtgaaattccacacacaggctttttccgctcacggcagcgggagagaagtcattgatgccatgtgccatgccaccctaacttacaggatgttggaaccaactagggttgttaactgggaagtgatcatcatggatgaagcccattttttggatccagctagcatagccgccagaggttgggcagcgcacagagctagggcaaatgaaagtgcaacaatcttgatgacagccacaccgcctgggactagtgatgaatttccacattcaaatggtgaaatagaagatgttcaaacggacatacccagtgagccctggaacacagggcatgactggatcctggctgacaaaaggcccacggcatggttccttccatccatcagagctgcaaatgtcatggctgcctctttgcgtaaggctggaaagagtgtggtggtcctgaacaggaaaacctttgagagagaataccccacgataaagcagaagaaacctgactttatattggccactgacatagctgaaatgggagccaacctttgcgtggagcgagtgctggattgcaggacggcttttaagcctgtgcttgtggatgaagggaggaaggtggcaataaaagggccacttcgcatctccgcatcctctgctgctcaaaggagggggcgcattgggagaaatcccaacagagatggagactcatactactattctgagcccacaagtgaagataatgcccaccacgtctgctggttggaggcctcaatgctcttggacaacatggaggtgaggggtggaatggtcgccccactctatggcgttgaaggaactaaaacaccagtttcccctggtgaaatgagactgagggatgaccagaggaaagtcttcagagaactagtgaggaattgtgacctgcccgtttggctttcgtggcaagtggccaaggctggtttgaagacgaatgatcgtaagtggtgttttgaaggccctgaggaacatgagatcttgaatgacagcggtgaaacagtgaagtgcagggctcctggaggagcaaagaagcctctgcgcccaaggtggtgtgatgaaagggtgtcatctgaccagagtgcgctgtctgaatttattaagtttgctgaaggtaggaggggagctgcggaagtgctagttgtgctgagtgaactccctgatttcctggctaaaaaaggtggagaggcaatggataccatcagtgtgtttctccactctgaggaaggctctagggcttaccgcaatgcactatcaatgatgcctgaggcaatgacaatagtcatgctgtttatactggctggactactgacatcgggaatggtcatctttttcatgtctcccaaaggcatcagtagaatgtctatggcgatgggcacaatggccggctgtggatatctcatgttccttggaggcgtcaaacccactcacatctcctatatcatgctcatattctttgtcctgatggtggttgtgatccccgagccagggcaacaaaggtccatccaagacaaccaagtggcatacctcattattggcatcctgacgctggtttcagtggtggcagccaacgagctaggcatgctggagaaaaccaaagaggacctctttgggaagaagaacttaattccatctagtgcttcaccctggagttggccggatcttgacctgaagccaggagctgcctggacagtgtacgttggcattgttacaatgctctctccaatgttgcaccactggatcaaagtcgaatatggcaacctgtctctgtctggaatagcccagtcagcctcagtcctttctttcatggacaaggggataccattcatgaagatgaatatctcggtcataatactgctggtcagtggctggaattcaataacagtgatgcctctgctctgtggcatagggtgcgccatgctccactggtctctcattttacctggaatcaaagcgcagcagtcaaagcttgcacagagaagggtgttccatggcgttgccaagaaccctgtggttgatgggaatccaacagttgacattgaggaagctcctgaaatgcctgccctttatgagaagaaactggctctatatctccttcttgctctcagcctagcttctgttgccatgtgcagaacgcccttttcattggctgaaggcattgtcctagcatcagctgccttagggccgctcatagagggaaacaccagccttctttggaatggacccatggctgtctccatgacaggagtcatgcgggggaattactatgcttttgtgggagtcatgtacaatctatggaagatgaaaactggacgccgggggagtgcgaatggaaaaactttgggtgaagtctggaagagggaactgaatctgttggacaagcaacagtttgagttgtataaaaggaccgacattgtggaggtggatcgtgatacggcacgcaggcatttggccgaagggaaggtggacaccggggtggcggtctccagggggaccgcaaagttaaggtggttccatgagcgtggctatgtcaagctggaaggtagggtgattgacctggggtgtggccgcggaggctggtgttactacgctgctgcgcaaaaggaagtgagtggggtcaaaggatttactcttggaagagacggccatgagaaacccatgaatgtgcaaagtctgggatggaacatcatcaccttcaaggacaaaactgatatccaccgcctagaaccagtgaaatgtgacacccttttgtgtgacattggagagtcatcatcgtcatcggtcacagagggggaaaggaccgtgagagttcttgatactgtagaaaaatggctggcttgtggggttgacaacttctgtgtgaaggtgttagctccatacatgccagatgttcttgagaaactggaattgctccaaaggaggtttggcggaacagtgatcaggaaccctctctccaggaattccactcatgaaatgtactacgtgtctggagcccgcagcaatgtcacatttactgtgaaccaaacatcccgcctcctgatgaggagaatgaggcgtccaactggaaaagtgaccctggaggctgacgtcatcctcccaattgggacacgcagtgttgagacagacaagggacccctggacaaagaggccatagaagaaagggttgagaggataaaatctgagtacatgacctcttggttttatgacaatgacaacccctacaggacctggcactactgtggctcctatgtcacaaaaacctcaggaagtgcggcgagcatggtaaatggtgttattaaaattctgacatacccatgggacaggatagaggaggtcacaagaatggcaatgactgacacaaccccttttggacagcaaagagtgtttaaagaaaaagttgacaccagagcaaaggatccaccagcgggaactaggaagatcatgaaagttgtcaacaggtggctgttccgccacctggccagagaaaagaaccccagactgtgcacaaaggaagaatttattgcaaaagtccgaagtcatgcagccattggagcttacctggaagaacaagaacagtggaagactgccaatgaggctgtccaagacccaaagttctgggaactggtggatgaagaaaggaagctgcaccaacaaggcaggtgtcggacttgtgtgtacaacatgatggggaaaagagagaagaagctgtcagagtttgggaaagcaaagggaagccgtgccatatggtatatgtggctgggagcgcggtatcttgagtttgaggccctgggattcctgaatgaggaccattgggcttccagggaaaactcaggaggaggagtggaaggcattggcttacaatacctaggatatgtgatcagagacctggctgcaatggatggtggtggattctacgcggatgacaccgctggatgggacacgcgcatcacagaggcagaccttgatgatgaacaggagatcttgaactacatgagcccacatcacaaaaaactggcacaagcagtgatggaaatgacatacaagaacaaagtggtgaaagtgttgagaccagccccaggagggaaagcctacatggatgtcataagtcgacgagaccagagaggatccgggcaggtagtgacttatgctctgaacaccatcaccaacttgaaagtccaattgatcagaatggcagaagcagagatggtgatacatcaccaacatgttcaagattgtgatgaatcagttctgaccaggctggaggcatggctcactgagcacggatgtaacagactgaagaggatggcggtgagtggagacgactgtgtggtccggcccatcgatgacaggttcggcctggccctgtcccatctcaacgccatgtccaaggttagaaaggacatatctgaatggcagccatcaaaagggtggaatgattgggagaatgtgcccttctgttcccaccacttccatgaactacagctgaaggatggcaggaggattgtggtgccttgccgagaacaggacgagctcattgggagaggaagggtgtctccaggaaacggctggatgatcaaggaaacagcttgcctcagcaaagcctatgccaacatgtggtcactgatgtattttcacaaaagggacatgaggctactgtcattggctgtttcctcagctgttcccacctcatgggttccacaaggacgcacaacatggtcgattcatgggaaaggggagtggatgaccacggaagacatgcttgaggtgtggaacagagtatggataaccaacaacccacacatgcaggacaagacaatggtgaaagaatggagagatgtcccttatctaaccaagagacaagacaagctgtgcggatcactgattggaatgaccaatagggccacctgggcctcccacatccatttggtcatccatcgtatccgaacgctgattggacaggagaaatatactgactacctaacagtcatggacagatattctgtggatgctgacctgcaaccgggtgagcttatctgaaacaccatctaataggaataaccgggatacaaaccacgggtggagaaccggactccccacaacttgaaaccgggatataaaccacggctggagaaccggactccgcacttaaaatgaaacagaaaccgggataaaaactacggatggagaaccggactccacacattgagacagaagaagttgtcagcccagaactccacacgagttttgccactgctaagctgtgaggcagtgcaggctgggacagccgacctccaggttgcgaaaaacctggtttctgggacctcccaccccagagtaaaaagaacggagcctccgctaccaccctcccacgtggtggtagaaagacggggtctagaggttagaggagaccctccagggaacaaatagtgggaccatattgacgccagggaaagaccggagtggttctctgcttttcctccaggggtctgtgagcacagtttgctcaagaataagcagacctttggatgacaaacacaaaac

SEQ ID NO: 94 - DNA, 8419 bp, Artificial Sequence
  Synthetic sequence
agtaaatcctgtgtgctaattgaggtgcattggtctgcaaatcgagttgctaggcaataaacacatttggattaattttaatcgttcgttgagcgattagcagagaactgaccagaacatgtctggtcgtaaagctcagggaaaaaccctgggcgtcaatatggtacgacgaggagttcgctccttgtcaaacaaaataaaacaaaaaacaaaacaaattggaaacagacctggaccttcaagaggtgttcaaggatttatctttttctttttgttcaacattttgactggaaaaaagatcacagcccacctaaagaggttgtggaaaatgctggacccaagacaaggcttggctgttctaaggaaagtcaagagagtggtggccagtttgatgagaggattgtcctcaaggaaacgccgttcccatgatgttctgactgtgcaattcctaattttgggaatgctgttgatgacgggtggagtgaccttggtgcggaaaaacagatggttgctcctaaatgtgacatctgaggacctcgggaaaacattctctgtgggcacaggcaactgcacaacaaacattttaaagagtgcccatggctctccaacattttggatgggaagtcatgaagtaaatgggacatggatgatccacaccttggaggcattagattacaaggagtgtgagtggccactgacacatacgattggaacatcagttgaagagagtgaaatgttcatgccgagatcaatcggaggcccagttagctctcacaatcatatccctggatacaaggttcagacgaacggaccttggatgcaggtaccactagaggtgaagagagaagcttgcccagggactagcgtgatcattgatggcaactgtgatggacggggaaaatcaaccagatccaccacggatagcgggaaaattattcctgaatggtgttgccgctcctgcacaatgccgcctgtgagcttccatggtagtgatgggtgttggtatcccatggaaattaggccaaggaaaacgcatgaaagccatctggtgcgctcctgggttacagctggagaaatacatgctgtcccttttggtttggtgagcatgatgatagcaatggaagtggtcctaaggaaaagacagggaccaaagcaaatgttggttggaggagtggtgctcttgggagcaatgctggtcgggcaagtaactctccttgatttgctgaaactcacagtggctgtgggattgcatttccatgagatgaacaatggaggagacgccatgtatatggcgttgattgctgccttttcaatcagaccagggctgctcatcggctttgggctcaggaccctatggagccctcgggaacgccttgtgctgaccctaggagcagccatggtggagattgccttgggtggcatgatgggcggcctgtggaagtatctaaatgcagtttctctctgcatcctgacaataaatgctgttgcttctaggaaagcatcaaataccatcttgcccctcatggctctgttgacacctgtcactatggctgaggtgagacttgccacaatgctcttttgtaccgtggttatcataggggtccttcaccagaactccaaggacacctccatgcagaagactatacctctggtggccctcacactcacatcttacctgggcttgacacaaccttttttgggcctgtgtgcatttctggcaacccgcatatttgggcgaaggagtatcccagtgaatgaggcactcgcagcagctggtctagtgggagtgctggcaggactggcttttcaggagatggagaacttccttggtccgattgcagttggaggaatcctgatgatgctggttagcgtggctgggagggtggatgggctagagctcaagaagcttggtgaagtttcatgggaagaggaggcggagatcagcggaagttccgcccgctatgatgtggcactcagtgaacaaggggagttcaagctgctttctgaagagaaagtgccatgggaccaggttgtgatgacctcgctggccttggttggggctgccattcatccatttgctcttctgctggtccttgctgggtggctgtttcatgtcaggggagctaggagaagtggggatgtcttgtgggatattcccactcctaagatcattgaggaatgtgaacatctggaggatgggatttatggcatattccagtcaaccttcttgggggcctcccagcgaggagtgggagtggcacagggaggggtgttccacacaatgtggcatgtcacaagaggagctttccttgtcaggaatggcaagaagttgattccatcttgggcttcagtaaaggaagaccttgtcgcctatggtggctcatggaagttggaaggcagatgggatggagaggaagaggtccaattgatcgctgctgttccaggaaagaacgtggtcaacgtccagacaaaaccgagcttgttcaaagtgaggaatgggggagaaatcggggctgtcgctcttgactatccgagtggcacttcaggatctcctattgttaacaggaacggagaggtgattgggctgtacggcaatggcatccttgtcggtgacaactccttcgtgtccgccatatcccagactgaggtgaaggaagaaggaaaggaggagctccaagagatcccgacaatgctaaagaaaggaatgacaactatccttgattttcatcctggagctgggaagacaagacgttttctcccacagatcttggccgagtgcgcacggagacgcttgcgcactcttgtgttggcccccaccagggttgttctttctgaaatgaaggaggcttttcacggcctggacgtgaaattccacacacaggctttttccgctcacggcagcgggagagaagtcattgatgccatgtgccatgccaccctaacttacaggatgttggaaccaactagggttgttaactgggaagtgatcatcatggatgaagcccattttttggatccagctagcatagccgccagaggttgggcagcgcacagagctagggcaaatgaaagtgcaacaatcttgatgacagccacaccgcctgggactagtgatgaatttccacattcaaatggtgaaatagaagatgttcaaacggacatacccagtgagccctggaacacagggcatgactggatcctggctgacaaaaggcccacggcatggttccttccatccatcagagctgcaaatgtcatggctgcctctttgcgtaaggctggaaagagtgtggtggtcctgaacaggaaaacctttgagagagaataccccacgataaagcagaagaaacctgactttatattggccactgacatagctgaaatgggagccaacctttgcgtggagcgagtgctggattgcaggacggcttttaagcctgtgcttgtggatgaagggaggaaggtggcaataaaagggccacttcgcatctccgcatcctctgctgctcaaaggagggggcgcattgggagaaatcccaacagagatggagactcatactactattctgagcccacaagtgaagataatgcccaccacgtctgctggttggaggcctcaatgctcttggacaacatggaggtgaggggtggaatggtcgccccactctatggcgttgaaggaactaaaacaccagtttcccctggtgaaatgagactgagggatgaccagaggaaagtcttcagagaactagtgaggaattgtgacctgcccgtttggctttcgtggcaagtggccaaggctggtttgaagacgaatgatcgtaagtggtgttttgaaggccctgaggaacatgagatcttgaatgacagcggtgaaacagtgaagtgcagggctcctggaggagcaaagaagcctctgcgcccaaggtggtgtgatgaaagggtgtcatctgaccagagtgcgctgtctgaatttattaagtttgctgaaggtaggaggggagctgcggaagtgctagttgtgctgagtgaactccctgatttcctggctaaaaaaggtggagaggcaatggataccatcagtgtgtttctccactctgaggaaggctctagggcttaccgcaatgcactatcaatgatgcctgaggcaatgacaatagtcatgctgtttatactggctggactactgacatcgggaatggtcatctttttcatgtctcccaaaggcatcagtagaatgtctatggcgatgggcacaatggccggctgtggatatctcatgttccttggaggcgtcaaacccactcacatctcctatatcatgctcatattctttgtcctgatggtggttgtgatccccgagccagggcaacaaaggtccatccaagacaaccaagtggcatacctcattattggcatcctgacgctggtttcagtggtggcagccaacgagctaggcatgctggagaaaaccaaagaggacctctttgggaagaagaacttaattccatctagtgcttcaccctggagttggccggatcttgacctgaagccaggagctgcctggacagtgtacgttggcattgttacaatgctctctccaatgttgcaccactggatcaaagtcgaatatggcaacctgtctctgtctggaatagcccagtcagcctcagtcctttctttcatggacaaggggataccattcatgaagatgaatatctcggtcataatactgctggtcagtggctggaattcaataacagtgatgcctctgctctgtggcatagggtgcgccatgctccactggtctctcattttacctggaatcaaagcgcagcagtcaaagcttgcacagagaagggtgttccatggcgttgccaagaaccctgtggttgatgggaatccaacagttgacattgaggaagctcctgaaatgcctgccctttatgagaagaaactggctctatatctccttcttgctctcagcctagcttctgttgccatgtgcagaacgcccttttcattggctgaaggcattgtcctagcatcagctgccttagggccgctcatagagggaaacaccagccttctttggaatggacccatggctgtctccatgacaggagtcatgcgggggaattactatgcttttgtgggagtcatgtacaatctatggaagatgaaaactggacgccgggggagtgcgaatggaaaaactttgggtgaagtctggaagagggaactgaatctgttggacaagcaacagtttgagttgtataaaaggaccgacattgtggaggtggatcgtgatacggcacgcaggcatttggccgaagggaaggtggacaccggggtggcggtctccagggggaccgcaaagttaaggtggttccatgagcgtggctatgtcaagctggaaggtagggtgattgacctggggtgtggccgcggaggctggtgttactacgctgctgcgcaaaaggaagtgagtggggtcaaaggatttactcttggaagagacggccatgagaaacccatgaatgtgcaaagtctgggatggaacatcatcaccttcaaggacaaaactgatatccaccgcctagaaccagtgaaatgtgacacccttttgtgtgacattggagagtcatcatcgtcatcggtcacagagggggaaaggaccgtgagagttcttgatactgtagaaaaatggctggcttgtggggttgacaacttctgtgtgaaggtgttagctccatacatgccagatgttcttgagaaactggaattgctccaaaggaggtttggcggaacagtgatcaggaaccctctctccaggaattccactcatgaaatgtactacgtgtctggagcccgcagcaatgtcacatttactgtgaaccaaacatcccgcctcctgatgaggagaatgaggcgtccaactggaaaagtgaccctggaggctgacgtcatcctcccaattgggacacgcagtgttgagacagacaagggacccctggacaaagaggccatagaagaaagggttgagaggataaaatctgagtacatgacctcttggttttatgacaatgacaacccctacaggacctggcactactgtggctcctatgtcacaaaaacctcaggaagtgcggcgagcatggtaaatggtgttattaaaattctgacatacccatgggacaggatagaggaggtcacaagaatggcaatgactgacacaaccccttttggacagcaaagagtgtttaaagaaaaagttgacaccagagcaaaggatccaccagcgggaactaggaagatcatgaaagttgtcaacaggtggctgttccgccacctggccagagaaaagaaccccagactgtgcacaaaggaagaatttattgcaaaagtccgaagtcatgcagccattggagcttacctggaagaacaagaacagtggaagactgccaatgaggctgtccaagacccaaagttctgggaactggtggatgaagaaaggaagctgcaccaacaaggcaggtgtcggacttgtgtgtacaacatgatggggaaaagagagaagaagctgtcagagtttgggaaagcaaagggaagccgtgccatatggtatatgtggctgggagcgcggtatcttgagtttgaggccctgggattcctgaatgaggaccattgggcttccagggaaaactcaggaggaggagtggaaggcattggcttacaatacctaggatatgtgatcagagacctggctgcaatggatggtggtggattctacgcggatgacaccgctggatgggacacgcgcatcacagaggcagaccttgatgatgaacaggagatcttgaactacatgagcccacatcacaaaaaactggcacaagcagtgatggaaatgacatacaagaacaaagtggtgaaagtgttgagaccagccccaggagggaaagcctacatggatgtcataagtcgacgagaccagagaggatccgggcaggtagtgacttatgctctgaacaccatcaccaacttgaaagtccaattgatcagaatggcagaagcagagatggtgatacatcaccaacatgttcaagattgtgatgaatcagttctgaccaggctggaggcatggctcactgagcacggatgtaacagactgaagaggatggcggtgagtggagacgactgtgtggtccggcccatcgatgacaggttcggcctggccctgtcccatctcaacgccatgtccaaggttagaaaggacatatctgaatggcagccatcaaaagggtggaatgattgggagaatgtgcccttctgttcccaccacttccatgaactacagctgaaggatggcaggaggattgtggtgccttgccgagaacaggacgagctcattgggagaggaagggtgtctccaggaaacggctggatgatcaaggaaacagcttgcctcagcaaagcctatgccaacatgtggtcactgatgtattttcacaaaagggacatgaggctactgtcattggctgtttcctcagctgttcccacctcatgggttccacaaggacgcacaacatggtcgattcatgggaaaggggagtggatgaccacggaagacatgcttgaggtgtggaacagagtatggataaccaacaacccacacatgcaggacaagacaatggtgaaagaatggagagatgtcccttatctaaccaagagacaagacaagctgtgcggatcactgattggaatgaccaatagggccacctgggcctcccacatccatttggtcatccatcgtatccgaacgctgattggacaggagaaatatactgactacctaacagtcatggacagatattctgtggatgctgacctgcaaccgggtgagcttatctgaaacaccatctaataggaataaccgggatacaaaccacgggtggagaaccggactccccacaacttgaaaccgggatataaaccacggctggagaaccggactccgcacttaaaatgaaacagaaaccgggataaaaactacggatggagaaccggactccacacattgagacagaagaagttgtcagcccagaactccacacgagttttgccactgctaagctgtgaggcagtgcaggctgggacagccgacctccaggttgcgaaaaacctggtttctgggacctcccaccccagagtaaaaagaacggagcctccgctaccaccctcccacgtggtggtagaaagacggggtctagaggttagaggagaccctccagggaacaaatagtgggaccatattgacgccagggaaagaccggagtggttctctgcttttcctccaggggtctgtgagcacagtttgctcaagaataagcagacctttggatgacaaacacaaaac

SEQ ID NO: 95 - DNA, 9463 bp, Artificial Sequence
  Synthetic sequence
agtaaatcctgtgtgctaattgaggtgcattggtctgcaaatcgagttgctaggcaataaacacatttggattaattttaatcgttcgttgagcgattagcagagaactgaccagaacatgtctggtcgtaaagctcagggaaaaaccctgggcgtcaatatggtacgacgaggagttcgctccttgtcaaacaaaataaaacaaaaaacaaaacaaattggaaacagacctggaccttcaagaggtgttcaaggatttatctttttctttttgttcaacattttgactggaaaaaagatcacagcccacctaaagaggttgtggaaaatgctggacccaagacaaggcttggctgttctaaggaaagtcaagagagtggtggccagtttgatgagaggattgtcctcaaggaaacgccgttcccatgatgttctgactgtgcaattcctaattttgggaatgctgttgatgacgggtggagtgaccttggtgcggaaaaacagatggttgctcctaaatgtgacatctgaggacctcgggaaaacattctctgtgggcacaggcaactgcacaacaaacattttggaagccaagtactggtgcccagactcaatggaatacaactgtcccaatctcagtccaagagaggagccagatgacattgattgctggtgctatggggtggaaaacgttagagtcgcatatggtaagtgtgactcagcaggcaggtctaggaggtcaagaagggccattgacttgcctacgcatgaaaaccatggtttgaagacccggcaagaaaaatggatgactggaagaatgggtgaaaggcaactccaaaagattgagagatggctcgtgaggaaccccttttttgcagtgacagctctgaccattgcctaccttgtgggaagcaacatgacgcaacgagtcgtgattgccctactggtcttggctgttggtccggcctactcagctcactgcattggaattactgacagggatttcattgagggggtgcatggaggaacttgggtttcagctaccctggagcaagacaagtgtgtcactgttatggcccctgacaagccttcattggacatctcactagagacagtagccattgatggacctgctgaggcgaggaaagtgtgttacaatgcagttctcactcatgtgaagattaatgacaagtgccccagcactggagaggcccacctagctgaagagaacgaaggggacaatgcgtgcaagcgcacttattctgatagaggctggggcaatggctgtggcctatttgggaaagggagcattgtggcatgcgccaaattcacttgtgccaaatccatgagtttgtttgaggttgatcagaccaaaattcagtatgtcatcagagcacaattgcatgtaggggccaagcaggaaaattggaataccgacattaagactctcaagtttgatgccctgtcaggctcccaggaagccgagttcactgggtatggaaaagctacactggaatgccaggtgcaaactgcggtggactttggtaacagttacatcgctgagatggaaaaagagagctggatagtggacagacagtgggcccaggacttgaccctgccatggcagagtaagagtgcccatggctctccaacattttggatgggaagtcatgaagtaaatgggacatggatgatccacaccttggaggcattagattacaaggagtgtgagtggccactgacacatacgattggaacatcagttgaagagagtgaaatgttcatgccgagatcaatcggaggcccagttagctctcacaatcatatccctggatacaaggttcagacgaacggaccttggatgcaggtaccactagaggtgaagagagaagcttgcccagggactagcgtgatcattgatggcaactgtgatggacggggaaaatcaaccagatccaccacggatagcgggaaaattattcctgaatggtgttgccgctcctgcacaatgccgcctgtgagcttccatggtagtgatgggtgttggtatcccatggaaattaggccaaggaaaacgcatgaaagccatctggtgcgctcctgggttacagctggagaaatacatgctgtcccttttggtttggtgagcatgatgatagcaatggaagtggtcctaaggaaaagacagggaccaaagcaaatgttggttggaggagtggtgctcttgggagcaatgctggtcgggcaagtaactctccttgatttgctgaaactcacagtggctgtgggattgcatttccatgagatgaacaatggaggagacgccatgtatatggcgttgattgctgccttttcaatcagaccagggctgctcatcggctttgggctcaggaccctatggagccctcgggaacgccttgtgctgaccctaggagcagccatggtggagattgccttgggtggcatgatgggcggcctgtggaagtatctaaatgcagtttctctctgcatcctgacaataaatgctgttgcttctaggaaagcatcaaataccatcttgcccctcatggctctgttgacacctgtcactatggctgaggtgagacttgccacaatgctcttttgtaccgtggttatcataggggtccttcaccagaactccaaggacacctccatgcagaagactatacctctggtggccctcacactcacatcttacctgggcttgacacaaccttttttgggcctgtgtgcatttctggcaacccgcatatttgggcgaaggagtatcccagtgaatgaggcactcgcagcagctggtctagtgggagtgctggcaggactggcttttcaggagatggagaacttccttggtccgattgcagttggaggaatcctgatgatgctggttagcgtggctgggagggtggatgggctagagctcaagaagcttggtgaagtttcatgggaagaggaggcggagatcagcggaagttccgcccgctatgatgtggcactcagtgaacaaggggagttcaagctgctttctgaagagaaagtgccatgggaccaggttgtgatgacctcgctggccttggttggggctgccattcatccatttgctcttctgctggtccttgctgggtggctgtttcatgtcaggggagctaggagaagtggggatgtcttgtgggatattcccactcctaagatcattgaggaatgtgaacatctggaggatgggatttatggcatattccagtcaaccttcttgggggcctcccagcgaggagtgggagtggcacagggaggggtgttccacacaatgtggcatgtcacaagaggagctttccttgtcaggaatggcaagaagttgattccatcttgggcttcagtaaaggaagaccttgtcgcctatggtggctcatggaagttggaaggcagatgggatggagaggaagaggtccaattgatcgctgctgttccaggaaagaacgtggtcaacgtccagacaaaaccgagcttgttcaaagtgaggaatgggggagaaatcggggctgtcgctcttgactatccgagtggcacttcaggatctcctattgttaacaggaacggagaggtgattgggctgtacggcaatggcatccttgtcggtgacaactccttcgtgtccgccatatcccagactgaggtgaaggaagaaggaaaggaggagctccaagagatcccgacaatgctaaagaaaggaatgacaactatccttgattttcatcctggagctgggaagacaagacgttttctcccacagatcttggccgagtgcgcacggagacgcttgcgcactcttgtgttggcccccaccagggttgttctttctgaaatgaaggaggcttttcacggcctggacgtgaaattccacacacaggctttttccgctcacggcagcgggagagaagtcattgatgccatgtgccatgccaccctaacttacaggatgttggaaccaactagggttgttaactgggaagtgatcatcatggatgaagcccattttttggatccagctagcatagccgccagaggttgggcagcgcacagagctagggcaaatgaaagtgcaacaatcttgatgacagccacaccgcctgggactagtgatgaatttccacattcaaatggtgaaatagaagatgttcaaacggacatacccagtgagccctggaacacagggcatgactggatcctggctgacaaaaggcccacggcatggttccttccatccatcagagctgcaaatgtcatggctgcctctttgcgtaaggctggaaagagtgtggtggtcctgaacaggaaaacctttgagagagaataccccacgataaagcagaagaaacctgactttatattggccactgacatagctgaaatgggagccaacctttgcgtggagcgagtgctggattgcaggacggcttttaagcctgtgcttgtggatgaagggaggaaggtggcaataaaagggccacttcgcatctccgcatcctctgctgctcaaaggagggggcgcattgggagaaatcccaacagagatggagactcatactactattctgagcccacaagtgaagataatgcccaccacgtctgctggttggaggcctcaatgctcttggacaacatggaggtgaggggtggaatggtcgccccactctatggcgttgaaggaactaaaacaccagtttcccctggtgaaatgagactgagggatgaccagaggaaagtcttcagagaactagtgaggaattgtgacctgcccgtttggctttcgtggcaagtggccaaggctggtttgaagacgaatgatcgtaagtggtgttttgaaggccctgaggaacatgagatcttgaatgacagcggtgaaacagtgaagtgcagggctcctggaggagcaaagaagcctctgcgcccaaggtggtgtgatgaaagggtgtcatctgaccagagtgcgctgtctgaatttattaagtttgctgaaggtaggaggggagctgcggaagtgctagttgtgctgagtgaactccctgatttcctggctaaaaaaggtggagaggcaatggataccatcagtgtgtttctccactctgaggaaggctctagggcttaccgcaatgcactatcaatgatgcctgaggcaatgacaatagtcatgctgtttatactggctggactactgacatcgggaatggtcatctttttcatgtctcccaaaggcatcagtagaatgtctatggcgatgggcacaatggccggctgtggatatctcatgttccttggaggcgtcaaacccactcacatctcctatatcatgctcatattctttgtcctgatggtggttgtgatccccgagccagggcaacaaaggtccatccaagacaaccaagtggcatacctcattattggcatcctgacgctggtttcagtggtggcagccaacgagctaggcatgctggagaaaaccaaagaggacctctttgggaagaagaacttaattccatctagtgcttcaccctggagttggccggatcttgacctgaagccaggagctgcctggacagtgtacgttggcattgttacaatgctctctccaatgttgcaccactggatcaaagtcgaatatggcaacctgtctctgtctggaatagcccagtcagcctcagtcctttctttcatggacaaggggataccattcatgaagatgaatatctcggtcataatactgctggtcagtggctggaattcaataacagtgatgcctctgctctgtggcatagggtgcgccatgctccactggtctctcattttacctggaatcaaagcgcagcagtcaaagcttgcacagagaagggtgttccatggcgttgccaagaaccctgtggttgatgggaatccaacagttgacattgaggaagctcctgaaatgcctgccctttatgagaagaaactggctctatatctccttcttgctctcagcctagcttctgttgccatgtgcagaacgcccttttcattggctgaaggcattgtcctagcatcagctgccttagggccgctcatagagggaaacaccagccttctttggaatggacccatggctgtctccatgacaggagtcatgcgggggaattactatgcttttgtgggagtcatgtacaatctatggaagatgaaaactggacgccgggggagtgcgaatggaaaaactttgggtgaagtctggaagagggaactgaatctgttggacaagcaacagtttgagttgtataaaaggaccgacattgtggaggtggatcgtgatacggcacgcaggcatttggccgaagggaaggtggacaccggggtggcggtctccagggggaccgcaaagttaaggtggttccatgagcgtggctatgtcaagctggaaggtagggtgattgacctggggtgtggccgcggaggctggtgttactacgctgctgcgcaaaaggaagtgagtggggtcaaaggatttactcttggaagagacggccatgagaaacccatgaatgtgcaaagtctgggatggaacatcatcaccttcaaggacaaaactgatatccaccgcctagaaccagtgaaatgtgacacccttttgtgtgacattggagagtcatcatcgtcatcggtcacagagggggaaaggaccgtgagagttcttgatactgtagaaaaatggctggcttgtggggttgacaacttctgtgtgaaggtgttagctccatacatgccagatgttcttgagaaactggaattgctccaaaggaggtttggcggaacagtgatcaggaaccctctctccaggaattccactcatgaaatgtactacgtgtctggagcccgcagcaatgtcacatttactgtgaaccaaacatcccgcctcctgatgaggagaatgaggcgtccaactggaaaagtgaccctggaggctgacgtcatcctcccaattgggacacgcagtgttgagacagacaagggacccctggacaaagaggccatagaagaaagggttgagaggataaaatctgagtacatgacctcttggttttatgacaatgacaacccctacaggacctggcactactgtggctcctatgtcacaaaaacctcaggaagtgcggcgagcatggtaaatggtgttattaaaattctgacatacccatgggacaggatagaggaggtcacaagaatggcaatgactgacacaaccccttttggacagcaaagagtgtttaaagaaaaagttgacaccagagcaaaggatccaccagcgggaactaggaagatcatgaaagttgtcaacaggtggctgttccgccacctggccagagaaaagaaccccagactgtgcacaaaggaagaatttattgcaaaagtccgaagtcatgcagccattggagcttacctggaagaacaagaacagtggaagactgccaatgaggctgtccaagacccaaagttctgggaactggtggatgaagaaaggaagctgcaccaacaaggcaggtgtcggacttgtgtgtacaacatgatggggaaaagagagaagaagctgtcagagtttgggaaagcaaagggaagccgtgccatatggtatatgtggctgggagcgcggtatcttgagtttgaggccctgggattcctgaatgaggaccattgggcttccagggaaaactcaggaggaggagtggaaggcattggcttacaatacctaggatatgtgatcagagacctggctgcaatggatggtggtggattctacgcggatgacaccgctggatgggacacgcgcatcacagaggcagaccttgatgatgaacaggagatcttgaactacatgagcccacatcacaaaaaactggcacaagcagtgatggaaatgacatacaagaacaaagtggtgaaagtgttgagaccagccccaggagggaaagcctacatggatgtcataagtcgacgagaccagagaggatccgggcaggtagtgacttatgctctgaacaccatcaccaacttgaaagtccaattgatcagaatggcagaagcagagatggtgatacatcaccaacatgttcaagattgtgatgaatcagttctgaccaggctggaggcatggctcactgagcacggatgtaacagactgaagaggatggcggtgagtggagacgactgtgtggtccggcccatcgatgacaggttcggcctggccctgtcccatctcaacgccatgtccaaggttagaaaggacatatctgaatggcagccatcaaaagggtggaatgattgggagaatgtgcccttctgttcccaccacttccatgaactacagctgaaggatggcaggaggattgtggtgccttgccgagaacaggacgagctcattgggagaggaagggtgtctccaggaaacggctggatgatcaaggaaacagcttgcctcagcaaagcctatgccaacatgtggtcactgatgtattttcacaaaagggacatgaggctactgtcattggctgtttcctcagctgttcccacctcatgggttccacaaggacgcacaacatggtcgattcatgggaaaggggagtggatgaccacggaagacatgcttgaggtgtggaacagagtatggataaccaacaacccacacatgcaggacaagacaatggtgaaagaatggagagatgtcccttatctaaccaagagacaagacaagctgtgcggatcactgattggaatgaccaatagggccacctgggcctcccacatccatttggtcatccatcgtatccgaacgctgattggacaggagaaatatactgactacctaacagtcatggacagatattctgtggatgctgacctgcaaccgggtgagcttatctgaaacaccatctaataggaataaccgggatacaaaccacgggtggagaaccggactccccacaacttgaaaccgggatataaaccacggctggagaaccggactccgcacttaaaatgaaacagaaaccgggataaaaactacggatggagaaccggactccacacattgagacagaagaagttgtcagcccagaactccacacgagttttgccactgctaagctgtgaggcagtgcaggctgggacagccgacctccaggttgcgaaaaacctggtttctgggacctcccaccccagagtaaaaagaacggagcctccgctaccaccctcccacgtggtggtagaaagacggggtctagaggttagaggagaccctccagggaacaaatagtgggaccatattgacgccagggaaagaccggagtggttctctgcttttcctccaggggtctgtgagcacagtttgctcaagaataagcagacctttggatgacaaacacaaaac

SEQ ID NO: 96 - DNA, 10351 bp, Artificial Sequence
  Synthetic sequence
agtaaatcctgtgtgctaattgaggtgcattggtctgcaaatcgagttgctaggcaataaacacatttggattaattttaatcgttcgttgagcgattagcagagaactgaccagaacatgtctggtcgtaaagctcagggaaaaaccctgggcgtcaatatggtacgacgaggagttcgctccttgtcaaacaaaataaaacaaaaaacaaaacaaattggaaacagacctggaccttcaagaggtgttcaaggatttatctttttctttttgttcaacattttgactggaaaaaagatcacagcccacctaaagaggttgtggaaaatgctggacccaagacaaggcttggctgttctaaggaaagtcaagagagtggtggccagtttgatgagaggattgtcctcaaggaaacgccgttcccatgatgttctgactgtgcaattcctaattttgggaatgctgttgatgacgggtggagtgaccttggtgcggaaaaacagatggttgctcctaaatgtgacatctgaggacctcgggaaaacattctctgtgggcacaggcaactgcacaacaaacattttggaagccaagtactggtgcccagactcaatggaatacaactgtcccaatctcagtccaagagaggagccagatgacattgattgctggtgctatggggtggaaaacgttagagtcgcatatggtaagtgtgactcagcaggcaggtctaggaggtcaagaagggccattgacttgcctacgcatgaaaaccatggtttgaagacccggcaagaaaaatggatgactggaagaatgggtgaaaggcaactccaaaagattgagagatggctcgtgaggaaccccttttttgcagtgacagctctgaccattgcctaccttgtgggaagcaacatgacgcaacgagtcgtgattgccctactggtcttggctgttggtccggcctactcagctcactgcattggaattactgacagggatttcattgagggggtgcatggaggaacttgggtttcagctaccctggagcaagacaagtgtgtcactgttatggcccctgacaagccttcattggacatctcactagagacagtagccattgatggacctgctgaggcgaggaaagtgtgttacaatgcagttctcactcatgtgaagattaatgacaagtgccccagcactggagaggcccacctagctgaagagaacgaaggggacaatgcgtgcaagcgcacttattctgatagaggctggggcaatggctgtggcctatttgggaaagggagcattgtggcatgcgccaaattcacttgtgccaaatccatgagtttgtttgaggttgatcagaccaaaattcagtatgtcatcagagcacaattgcatgtaggggccaagcaggaaaattggaataccgacattaagactctcaagtttgatgccctgtcaggctcccaggaagccgagttcactgggtatggaaaagctacactggaatgccaggtgcaaactgcggtggactttggtaacagttacatcgctgagatggaaaaagagagctggatagtggacagacagtgggcccaggacttgaccctgccatggcagagtggaagtggcggggtgtggagagagatgcatcatcttgtcgaatttgaacctccgcatgccgccactatcagagtactggccctgggaaaccaggaaggctccttgaaaacagctcttaccggcgcaatgagggttacaaaggacacaaatgacaacaacctttacaaactacatggtggacatgtttcctgcagagtgaaattgtcagctttgacactcaaggggacatcctacaaaatgtgcactgacaaaatgtcttttgtcaagaacccaactgacactggccatggcactgttgtgatgcaggtgaaagtgccaaaaggagccccctgcaagattccagtgatagtagctgatgatcttacagcggcaatcaataaaggcattttggttacagttaaccccatcgcctcaaccaatgatgatgaagtgctgattgaggtgaacccaccttttggagacagctacattatcgttgggacaggagattcacgtctcacttaccagtggcacaaagagggaagctcaataggaaagttgttcactcagaccatgaaaggcgcggaacgcctggccgtcatgggagacgccgcctgggatttcagctccgctggagggttcttcacttcggttgggaaaggaattcatacggtgtttggctctgcctttcaggggctatttggcggcttgaactggataacaaaggtcatcatgggggcggtactcatatgggttggcatcaacacaagaaacatgacaatgtccatgagcatgatcttggtaggagtgatcatgatgtttttgtctctaggagttggggcggatcaaggatgcgccatcaactttggcaagagagagctcaagtgcggagatggtatcttcatatttagagactctgatgactggctgaacaagtactcatactatccagaagatcctgtgaagctggcatcaatagtgaaagaggcattagattacaaggagtgtgagtggccactgacacatacgattggaacatcagttgaagagagtgaaatgttcatgccgagatcaatcggaggcccagttagctctcacaatcatatccctggatacaaggttcagacgaacggaccttggatgcaggtaccactagaggtgaagagagaagcttgcccagggactagcgtgatcattgatggcaactgtgatggacggggaaaatcaaccagatccaccacggatagcgggaaaattattcctgaatggtgttgccgctcctgcacaatgccgcctgtgagcttccatggtagtgatgggtgttggtatcccatggaaattaggccaaggaaaacgcatgaaagccatctggtgcgctcctgggttacagctggagaaatacatgctgtcccttttggtttggtgagcatgatgatagcaatggaagtggtcctaaggaaaagacagggaccaaagcaaatgttggttggaggagtggtgctcttgggagcaatgctggtcgggcaagtaactctccttgatttgctgaaactcacagtggctgtgggattgcatttccatgagatgaacaatggaggagacgccatgtatatggcgttgattgctgccttttcaatcagaccagggctgctcatcggctttgggctcaggaccctatggagccctcgggaacgccttgtgctgaccctaggagcagccatggtggagattgccttgggtggcatgatgggcggcctgtggaagtatctaaatgcagtttctctctgcatcctgacaataaatgctgttgcttctaggaaagcatcaaataccatcttgcccctcatggctctgttgacacctgtcactatggctgaggtgagacttgccacaatgctcttttgtaccgtggttatcataggggtccttcaccagaactccaaggacacctccatgcagaagactatacctctggtggccctcacactcacatcttacctgggcttgacacaaccttttttgggcctgtgtgcatttctggcaacccgcatatttgggcgaaggagtatcccagtgaatgaggcactcgcagcagctggtctagtgggagtgctggcaggactggcttttcaggagatggagaacttccttggtccgattgcagttggaggaatcctgatgatgctggttagcgtggctgggagggtggatgggctagagctcaagaagcttggtgaagtttcatgggaagaggaggcggagatcagcggaagttccgcccgctatgatgtggcactcagtgaacaaggggagttcaagctgctttctgaagagaaagtgccatgggaccaggttgtgatgacctcgctggccttggttggggctgccattcatccatttgctcttctgctggtccttgctgggtggctgtttcatgtcaggggagctaggagaagtggggatgtcttgtgggatattcccactcctaagatcattgaggaatgtgaacatctggaggatgggatttatggcatattccagtcaaccttcttgggggcctcccagcgaggagtgggagtggcacagggaggggtgttccacacaatgtggcatgtcacaagaggagctttccttgtcaggaatggcaagaagttgattccatcttgggcttcagtaaaggaagaccttgtcgcctatggtggctcatggaagttggaaggcagatgggatggagaggaagaggtccaattgatcgctgctgttccaggaaagaacgtggtcaacgtccagacaaaaccgagcttgttcaaagtgaggaatgggggagaaatcggggctgtcgctcttgactatccgagtggcacttcaggatctcctattgttaacaggaacggagaggtgattgggctgtacggcaatggcatccttgtcggtgacaactccttcgtgtccgccatatcccagactgaggtgaaggaagaaggaaaggaggagctccaagagatcccgacaatgctaaagaaaggaatgacaactatccttgattttcatcctggagctgggaagacaagacgttttctcccacagatcttggccgagtgcgcacggagacgcttgcgcactcttgtgttggcccccaccagggttgttctttctgaaatgaaggaggcttttcacggcctggacgtgaaattccacacacaggctttttccgctcacggcagcgggagagaagtcattgatgccatgtgccatgccaccctaacttacaggatgttggaaccaactagggttgttaactgggaagtgatcatcatggatgaagcccattttttggatccagctagcatagccgccagaggttgggcagcgcacagagctagggcaaatgaaagtgcaacaatcttgatgacagccacaccgcctgggactagtgatgaatttccacattcaaatggtgaaatagaagatgttcaaacggacatacccagtgagccctggaacacagggcatgactggatcctggctgacaaaaggcccacggcatggttccttccatccatcagagctgcaaatgtcatggctgcctctttgcgtaaggctggaaagagtgtggtggtcctgaacaggaaaacctttgagagagaataccccacgataaagcagaagaaacctgactttatattggccactgacatagctgaaatgggagccaacctttgcgtggagcgagtgctggattgcaggacggcttttaagcctgtgcttgtggatgaagggaggaaggtggcaataaaagggccacttcgcatctccgcatcctctgctgctcaaaggagggggcgcattgggagaaatcccaacagagatggagactcatactactattctgagcccacaagtgaagataatgcccaccacgtctgctggttggaggcctcaatgctcttggacaacatggaggtgaggggtggaatggtcgccccactctatggcgttgaaggaactaaaacaccagtttcccctggtgaaatgagactgagggatgaccagaggaaagtcttcagagaactagtgaggaattgtgacctgcccgtttggctttcgtggcaagtggccaaggctggtttgaagacgaatgatcgtaagtggtgttttgaaggccctgaggaacatgagatcttgaatgacagcggtgaaacagtgaagtgcagggctcctggaggagcaaagaagcctctgcgcccaaggtggtgtgatgaaagggtgtcatctgaccagagtgcgctgtctgaatttattaagtttgctgaaggtaggaggggagctgcggaagtgctagttgtgctgagtgaactccctgatttcctggctaaaaaaggtggagaggcaatggataccatcagtgtgtttctccactctgaggaaggctctagggcttaccgcaatgcactatcaatgatgcctgaggcaatgacaatagtcatgctgtttatactggctggactactgacatcgggaatggtcatctttttcatgtctcccaaaggcatcagtagaatgtctatggcgatgggcacaatggccggctgtggatatctcatgttccttggaggcgtcaaacccactcacatctcctatatcatgctcatattctttgtcctgatggtggttgtgatccccgagccagggcaacaaaggtccatccaagacaaccaagtggcatacctcattattggcatcctgacgctggtttcagtggtggcagccaacgagctaggcatgctggagaaaaccaaagaggacctctttgggaagaagaacttaattccatctagtgcttcaccctggagttggccggatcttgacctgaagccaggagctgcctggacagtgtacgttggcattgttacaatgctctctccaatgttgcaccactggatcaaagtcgaatatggcaacctgtctctgtctggaatagcccagtcagcctcagtcctttctttcatggacaaggggataccattcatgaagatgaatatctcggtcataatactgctggtcagtggctggaattcaataacagtgatgcctctgctctgtggcatagggtgcgccatgctccactggtctctcattttacctggaatcaaagcgcagcagtcaaagcttgcacagagaagggtgttccatggcgttgccaagaaccctgtggttgatgggaatccaacagttgacattgaggaagctcctgaaatgcctgccctttatgagaagaaactggctctatatctccttcttgctctcagcctagcttctgttgccatgtgcagaacgcccttttcattggctgaaggcattgtcctagcatcagctgccttagggccgctcatagagggaaacaccagccttctttggaatggacccatggctgtctccatgacaggagtcatgcgggggaattactatgcttttgtgggagtcatgtacaatctatggaagatgaaaactggacgccgggggagtgcgaatggaaaaactttgggtgaagtctggaagagggaactgaatctgttggacaagcaacagtttgagttgtataaaaggaccgacattgtggaggtggatcgtgatacggcacgcaggcatttggccgaagggaaggtggacaccggggtggcggtctccagggggaccgcaaagttaaggtggttccatgagcgtggctatgtcaagctggaaggtagggtgattgacctggggtgtggccgcggaggctggtgttactacgctgctgcgcaaaaggaagtgagtggggtcaaaggatttactcttggaagagacggccatgagaaacccatgaatgtgcaaagtctgggatggaacatcatcaccttcaaggacaaaactgatatccaccgcctagaaccagtgaaatgtgacacccttttgtgtgacattggagagtcatcatcgtcatcggtcacagagggggaaaggaccgtgagagttcttgatactgtagaaaaatggctggcttgtggggttgacaacttctgtgtgaaggtgttagctccatacatgccagatgttcttgagaaactggaattgctccaaaggaggtttggcggaacagtgatcaggaaccctctctccaggaattccactcatgaaatgtactacgtgtctggagcccgcagcaatgtcacatttactgtgaaccaaacatcccgcctcctgatgaggagaatgaggcgtccaactggaaaagtgaccctggaggctgacgtcatcctcccaattgggacacgcagtgttgagacagacaagggacccctggacaaagaggccatagaagaaagggttgagaggataaaatctgagtacatgacctcttggttttatgacaatgacaacccctacaggacctggcactactgtggctcctatgtcacaaaaacctcaggaagtgcggcgagcatggtaaatggtgttattaaaattctgacatacccatgggacaggatagaggaggtcacaagaatggcaatgactgacacaaccccttttggacagcaaagagtgtttaaagaaaaagttgacaccagagcaaaggatccaccagcgggaactaggaagatcatgaaagttgtcaacaggtggctgttccgccacctggccagagaaaagaaccccagactgtgcacaaaggaagaatttattgcaaaagtccgaagtcatgcagccattggagcttacctggaagaacaagaacagtggaagactgccaatgaggctgtccaagacccaaagttctgggaactggtggatgaagaaaggaagctgcaccaacaaggcaggtgtcggacttgtgtgtacaacatgatggggaaaagagagaagaagctgtcagagtttgggaaagcaaagggaagccgtgccatatggtatatgtggctgggagcgcggtatcttgagtttgaggccctgggattcctgaatgaggaccattgggcttccagggaaaactcaggaggaggagtggaaggcattggcttacaatacctaggatatgtgatcagagacctggctgcaatggatggtggtggattctacgcggatgacaccgctggatgggacacgcgcatcacagaggcagaccttgatgatgaacaggagatcttgaactacatgagcccacatcacaaaaaactggcacaagcagtgatggaaatgacatacaagaacaaagtggtgaaagtgttgagaccagccccaggagggaaagcctacatggatgtcataagtcgacgagaccagagaggatccgggcaggtagtgacttatgctctgaacaccatcaccaacttgaaagtccaattgatcagaatggcagaagcagagatggtgatacatcaccaacatgttcaagattgtgatgaatcagttctgaccaggctggaggcatggctcactgagcacggatgtaacagactgaagaggatggcggtgagtggagacgactgtgtggtccggcccatcgatgacaggttcggcctggccctgtcccatctcaacgccatgtccaaggttagaaaggacatatctgaatggcagccatcaaaagggtggaatgattgggagaatgtgcccttctgttcccaccacttccatgaactacagctgaaggatggcaggaggattgtggtgccttgccgagaacaggacgagctcattgggagaggaagggtgtctccaggaaacggctggatgatcaaggaaacagcttgcctcagcaaagcctatgccaacatgtggtcactgatgtattttcacaaaagggacatgaggctactgtcattggctgtttcctcagctgttcccacctcatgggttccacaaggacgcacaacatggtcgattcatgggaaaggggagtggatgaccacggaagacatgcttgaggtgtggaacagagtatggataaccaacaacccacacatgcaggacaagacaatggtgaaagaatggagagatgtcccttatctaaccaagagacaagacaagctgtgcggatcactgattggaatgaccaatagggccacctgggcctcccacatccatttggtcatccatcgtatccgaacgctgattggacaggagaaatatactgactacctaacagtcatggacagatattctgtggatgctgacctgcaaccgggtgagcttatctgaaacaccatctaataggaataaccgggatacaaaccacgggtggagaaccggactccccacaacttgaaaccgggatataaaccacggctggagaaccggactccgcacttaaaatgaaacagaaaccgggataaaaactacggatggagaaccggactccacacattgagacagaagaagttgtcagcccagaactccacacgagttttgccactgctaagctgtgaggcagtgcaggctgggacagccgacctccaggttgcgaaaaacctggtttctgggacctcccaccccagagtaaaaagaacggagcctccgctaccaccctcccacgtggtggtagaaagacggggtctagaggttagaggagaccctccagggaacaaatagtgggaccatattgacgccagggaaagaccggagtggttctctgcttttcctccaggggtctgtgagcacagtttgctcaagaataagcagacctttggatgacaaacacaaaac

SEQ ID NO: 97 - DNA, 10850 bp, Artificial Sequence
  Synthetic sequence
agtaaatcctgtgtgctaattgaggtgcattggtctgcaaatcgagttgctaggcaataaacacatttggattaattttaatcgttcgttgagcgattagcagagaactgaccagaacatgtctggtcgtaaagctcagggaaaaaccctgggcgtcaatatggtacgacgaggagttcgctccttgtcaaacaaaataaaacaaaaaacaaaacaaattggaaacagacctggaccttcaagaggtgttcaaggatttatctttttctttttgttcaacattttgactggaaaaaagatcacagcccacctaaagaggttgtggaaaatgctggacccaagacaaggcttggctgttctaaggaaagtcaagagagtggtggccagtttgatgagaggattgtcctcaaggaaacgccgttcccatgatgttctgactgtgcaattcctaattttgggaatgctgttgatgacgggtggagtgaccttggtgcggaaaaacagatggttgctcctaaatgtgacatctgaggacctcgggaaaacattctctgtgggcacaggcaactgcacaacaaacattttggaagccaagtactggtgcccagactcaatggaatacaactgtcccaatctcagtccaagagaggagccagatgacattgattgctggtgctatggggtggaaaacgttagagtcgcatatggtaagtgtgactcagcaggcaggtctaggaggtcaagaagggccattgacttgcctacgcatgaaaaccatggtttgaagacccggcaagaaaaatggatgactggaagaatgggtgaaaggcaactccaaaagattgagagatggctcgtgaggaaccccttttttgcagtgacagctctgaccattgcctaccttgtgggaagcaacatgacgcaacgagtcgtgattgccctactggtcttggctgttggtccggcctactcagctcactgcattggaattactgacagggatttcattgagggggtgcatggaggaacttgggtttcagctaccctggagcaagacaagtgtgtcactgttatggcccctgacaagccttcattggacatctcactagagacagtagccattgatggacctgctgaggcgaggaaagtgtgttacaatgcagttctcactcatgtgaagattaatgacaagtgccccagcactggagaggcccacctagctgaagagaacgaaggggacaatgcgtgcaagcgcacttattctgatagaggctggggcaatggctgtggcctatttgggaaagggagcattgtggcatgcgccaaattcacttgtgccaaatccatgagtttgtttgaggttgatcagaccaaaattcagtatgtcatcagagcacaattgcatgtaggggccaagcaggaaaattggaataccgacattaagactctcaagtttgatgccctgtcaggctcccaggaagccgagttcactgggtatggaaaagctacactggaatgccaggtgcaaactgcggtggactttggtaacagttacatcgctgagatggaaaaagagagctggatagtggacagacagtgggcccaggacttgaccctgccatggcagagtggaagtggcggggtgtggagagagatgcatcatcttgtcgaatttgaacctccgcatgccgccactatcagagtactggccctgggaaaccaggaaggctccttgaaaacagctcttaccggcgcaatgagggttacaaaggacacaaatgacaacaacctttacaaactacatggtggacatgtttcctgcagagtgaaattgtcagctttgacactcaaggggacatcctacaaaatgtgcactgacaaaatgtcttttgtcaagaacccaactgacactggccatggcactgttgtgatgcaggtgaaagtgccaaaaggagccccctgcaagattccagtgatagtagctgatgatcttacagcggcaatcaataaaggcattttggttacagttaaccccatcgcctcaaccaatgatgatgaagtgctgattgaggtgaacccaccttttggagacagctacattatcgttgggacaggagattcacgtctcacttaccagtggcacaaagagggaagctcaataggaaagttgttcactcagaccatgaaaggcgcggaacgcctggccgtcatgggagacgccgcctgggatttcagctccgctggagggttcttcacttcggttgggaaaggaattcatacggtgtttggctctgcctttcaggggctatttggcggcttgaactggataacaaaggtcatcatgggggcggtactcatatgggttggcatcaacacaagaaacatgacaatgtccatgagcatgatcttggtaggagtgatcatgatgtttttgtctctaggagttggggcggatcaaggatgcgccatcaactttggcaagagagagctcaagtgcggagatggtatcttcatatttagagactctgatgactggctgaacaagtactcatactatccagaagatcctgtgaagctggcatcaatagtgaaagcctcttttgaagaagggaagtgtggcctaaattcagttgactcccttgagcatgagatgtggagaagcagggcagatgagatcaatgccattcttgaggaaaacgaggtggacatttctgttgtcgtgcaggatccaaagaatgtttaccagagaggaactcatccattttccagaattcgggatggtctgcagtatggttggaagacttggggtaagaaccttgtgttctccccagggaggaagaatggaagcttcatcatagatggaaagtccaggaaagaatgcccgttttcaaaccgggtctggaattctttccagatagaggagtttgggacgggagtgttcaccacacgcgtgtacatggacgcagtctttgaatacaccatagactgcgatggatctatcttgggtgcagcggtgaacggaaaaaagagtgcccatggctctccaacattttggatgggaagtcatgaagtaaatgggacatggatgatccacaccttggaggcattagattacaaggagtgtgagtggccactgacacatacgattggaacatcagttgaagagagtgaaatgttcatgccgagatcaatcggaggcccagttagctctcacaatcatatccctggatacaaggttcagacgaacggaccttggatgcaggtaccactagaggtgaagagagaagcttgcccagggactagcgtgatcattgatggcaactgtgatggacggggaaaatcaaccagatccaccacggatagcgggaaaattattcctgaatggtgttgccgctcctgcacaatgccgcctgtgagcttccatggtagtgatgggtgttggtatcccatggaaattaggccaaggaaaacgcatgaaagccatctggtgcgctcctgggttacagctggagaaatacatgctgtcccttttggtttggtgagcatgatgatagcaatggaagtggtcctaaggaaaagacagggaccaaagcaaatgttggttggaggagtggtgctcttgggagcaatgctggtcgggcaagtaactctccttgatttgctgaaactcacagtggctgtgggattgcatttccatgagatgaacaatggaggagacgccatgtatatggcgttgattgctgccttttcaatcagaccagggctgctcatcggctttgggctcaggaccctatggagccctcgggaacgccttgtgctgaccctaggagcagccatggtggagattgccttgggtggcatgatgggcggcctgtggaagtatctaaatgcagtttctctctgcatcctgacaataaatgctgttgcttctaggaaagcatcaaataccatcttgcccctcatggctctgttgacacctgtcactatggctgaggtgagacttgccacaatgctcttttgtaccgtggttatcataggggtccttcaccagaactccaaggacacctccatgcagaagactatacctctggtggccctcacactcacatcttacctgggcttgacacaaccttttttgggcctgtgtgcatttctggcaacccgcatatttgggcgaaggagtatcccagtgaatgaggcactcgcagcagctggtctagtgggagtgctggcaggactggcttttcaggagatggagaacttccttggtccgattgcagttggaggaatcctgatgatgctggttagcgtggctgggagggtggatgggctagagctcaagaagcttggtgaagtttcatgggaagaggaggcggagatcagcggaagttccgcccgctatgatgtggcactcagtgaacaaggggagttcaagctgctttctgaagagaaagtgccatgggaccaggttgtgatgacctcgctggccttggttggggctgccattcatccatttgctcttctgctggtccttgctgggtggctgtttcatgtcaggggagctaggagaagtggggatgtcttgtgggatattcccactcctaagatcattgaggaatgtgaacatctggaggatgggatttatggcatattccagtcaaccttcttgggggcctcccagcgaggagtgggagtggcacagggaggggtgttccacacaatgtggcatgtcacaagaggagctttccttgtcaggaatggcaagaagttgattccatcttgggcttcagtaaaggaagaccttgtcgcctatggtggctcatggaagttggaaggcagatgggatggagaggaagaggtccaattgatcgctgctgttccaggaaagaacgtggtcaacgtccagacaaaaccgagcttgttcaaagtgaggaatgggggagaaatcggggctgtcgctcttgactatccgagtggcacttcaggatctcctattgttaacaggaacggagaggtgattgggctgtacggcaatggcatccttgtcggtgacaactccttcgtgtccgccatatcccagactgaggtgaaggaagaaggaaaggaggagctccaagagatcccgacaatgctaaagaaaggaatgacaactatccttgattttcatcctggagctgggaagacaagacgttttctcccacagatcttggccgagtgcgcacggagacgcttgcgcactcttgtgttggcccccaccagggttgttctttctgaaatgaaggaggcttttcacggcctggacgtgaaattccacacacaggctttttccgctcacggcagcgggagagaagtcattgatgccatgtgccatgccaccctaacttacaggatgttggaaccaactagggttgttaactgggaagtgatcatcatggatgaagcccattttttggatccagctagcatagccgccagaggttgggcagcgcacagagctagggcaaatgaaagtgcaacaatcttgatgacagccacaccgcctgggactagtgatgaatttccacattcaaatggtgaaatagaagatgttcaaacggacatacccagtgagccctggaacacagggcatgactggatcctggctgacaaaaggcccacggcatggttccttccatccatcagagctgcaaatgtcatggctgcctctttgcgtaaggctggaaagagtgtggtggtcctgaacaggaaaacctttgagagagaataccccacgataaagcagaagaaacctgactttatattggccactgacatagctgaaatgggagccaacctttgcgtggagcgagtgctggattgcaggacggcttttaagcctgtgcttgtggatgaagggaggaaggtggcaataaaagggccacttcgcatctccgcatcctctgctgctcaaaggagggggcgcattgggagaaatcccaacagagatggagactcatactactattctgagcccacaagtgaagataatgcccaccacgtctgctggttggaggcctcaatgctcttggacaacatggaggtgaggggtggaatggtcgccccactctatggcgttgaaggaactaaaacaccagtttcccctggtgaaatgagactgagggatgaccagaggaaagtcttcagagaactagtgaggaattgtgacctgcccgtttggctttcgtggcaagtggccaaggctggtttgaagacgaatgatcgtaagtggtgttttgaaggccctgaggaacatgagatcttgaatgacagcggtgaaacagtgaagtgcagggctcctggaggagcaaagaagcctctgcgcccaaggtggtgtgatgaaagggtgtcatctgaccagagtgcgctgtctgaatttattaagtttgctgaaggtaggaggggagctgcggaagtgctagttgtgctgagtgaactccctgatttcctggctaaaaaaggtggagaggcaatggataccatcagtgtgtttctccactctgaggaaggctctagggcttaccgcaatgcactatcaatgatgcctgaggcaatgacaatagtcatgctgtttatactggctggactactgacatcgggaatggtcatctttttcatgtctcccaaaggcatcagtagaatgtctatggcgatgggcacaatggccggctgtggatatctcatgttccttggaggcgtcaaacccactcacatctcctatatcatgctcatattctttgtcctgatggtggttgtgatccccgagccagggcaacaaaggtccatccaagacaaccaagtggcatacctcattattggcatcctgacgctggtttcagtggtggcagccaacgagctaggcatgctggagaaaaccaaagaggacctctttgggaagaagaacttaattccatctagtgcttcaccctggagttggccggatcttgacctgaagccaggagctgcctggacagtgtacgttggcattgttacaatgctctctccaatgttgcaccactggatcaaagtcgaatatggcaacctgtctctgtctggaatagcccagtcagcctcagtcctttctttcatggacaaggggataccattcatgaagatgaatatctcggtcataatactgctggtcagtggctggaattcaataacagtgatgcctctgctctgtggcatagggtgcgccatgctccactggtctctcattttacctggaatcaaagcgcagcagtcaaagcttgcacagagaagggtgttccatggcgttgccaagaaccctgtggttgatgggaatccaacagttgacattgaggaagctcctgaaatgcctgccctttatgagaagaaactggctctatatctccttcttgctctcagcctagcttctgttgccatgtgcagaacgcccttttcattggctgaaggcattgtcctagcatcagctgccttagggccgctcatagagggaaacaccagccttctttggaatggacccatggctgtctccatgacaggagtcatgcgggggaattactatgcttttgtgggagtcatgtacaatctatggaagatgaaaactggacgccgggggagtgcgaatggaaaaactttgggtgaagtctggaagagggaactgaatctgttggacaagcaacagtttgagttgtataaaaggaccgacattgtggaggtggatcgtgatacggcacgcaggcatttggccgaagggaaggtggacaccggggtggcggtctccagggggaccgcaaagttaaggtggttccatgagcgtggctatgtcaagctggaaggtagggtgattgacctggggtgtggccgcggaggctggtgttactacgctgctgcgcaaaaggaagtgagtggggtcaaaggatttactcttggaagagacggccatgagaaacccatgaatgtgcaaagtctgggatggaacatcatcaccttcaaggacaaaactgatatccaccgcctagaaccagtgaaatgtgacacccttttgtgtgacattggagagtcatcatcgtcatcggtcacagagggggaaaggaccgtgagagttcttgatactgtagaaaaatggctggcttgtggggttgacaacttctgtgtgaaggtgttagctccatacatgccagatgttcttgagaaactggaattgctccaaaggaggtttggcggaacagtgatcaggaaccctctctccaggaattccactcatgaaatgtactacgtgtctggagcccgcagcaatgtcacatttactgtgaaccaaacatcccgcctcctgatgaggagaatgaggcgtccaactggaaaagtgaccctggaggctgacgtcatcctcccaattgggacacgcagtgttgagacagacaagggacccctggacaaagaggccatagaagaaagggttgagaggataaaatctgagtacatgacctcttggttttatgacaatgacaacccctacaggacctggcactactgtggctcctatgtcacaaaaacctcaggaagtgcggcgagcatggtaaatggtgttattaaaattctgacatacccatgggacaggatagaggaggtcacaagaatggcaatgactgacacaaccccttttggacagcaaagagtgtttaaagaaaaagttgacaccagagcaaaggatccaccagcgggaactaggaagatcatgaaagttgtcaacaggtggctgttccgccacctggccagagaaaagaaccccagactgtgcacaaaggaagaatttattgcaaaagtccgaagtcatgcagccattggagcttacctggaagaacaagaacagtggaagactgccaatgaggctgtccaagacccaaagttctgggaactggtggatgaagaaaggaagctgcaccaacaaggcaggtgtcggacttgtgtgtacaacatgatggggaaaagagagaagaagctgtcagagtttgggaaagcaaagggaagccgtgccatatggtatatgtggctgggagcgcggtatcttgagtttgaggccctgggattcctgaatgaggaccattgggcttccagggaaaactcaggaggaggagtggaaggcattggcttacaatacctaggatatgtgatcagagacctggctgcaatggatggtggtggattctacgcggatgacaccgctggatgggacacgcgcatcacagaggcagaccttgatgatgaacaggagatcttgaactacatgagcccacatcacaaaaaactggcacaagcagtgatggaaatgacatacaagaacaaagtggtgaaagtgttgagaccagccccaggagggaaagcctacatggatgtcataagtcgacgagaccagagaggatccgggcaggtagtgacttatgctctgaacaccatcaccaacttgaaagtccaattgatcagaatggcagaagcagagatggtgatacatcaccaacatgttcaagattgtgatgaatcagttctgaccaggctggaggcatggctcactgagcacggatgtaacagactgaagaggatggcggtgagtggagacgactgtgtggtccggcccatcgatgacaggttcggcctggccctgtcccatctcaacgccatgtccaaggttagaaaggacatatctgaatggcagccatcaaaagggtggaatgattgggagaatgtgcccttctgttcccaccacttccatgaactacagctgaaggatggcaggaggattgtggtgccttgccgagaacaggacgagctcattgggagaggaagggtgtctccaggaaacggctggatgatcaaggaaacagcttgcctcagcaaagcctatgccaacatgtggtcactgatgtattttcacaaaagggacatgaggctactgtcattggctgtttcctcagctgttcccacctcatgggttccacaaggacgcacaacatggtcgattcatgggaaaggggagtggatgaccacggaagacatgcttgaggtgtggaacagagtatggataaccaacaacccacacatgcaggacaagacaatggtgaaagaatggagagatgtcccttatctaaccaagagacaagacaagctgtgcggatcactgattggaatgaccaatagggccacctgggcctcccacatccatttggtcatccatcgtatccgaacgctgattggacaggagaaatatactgactacctaacagtcatggacagatattctgtggatgctgacctgcaaccgggtgagcttatctgaaacaccatctaataggaataaccgggatacaaaccacgggtggagaaccggactccccacaacttgaaaccgggatataaaccacggctggagaaccggactccgcacaaacagaaaccgggataaaaactacggatggagaaccggactccacacattgagacagaagaagttgtcagcccagaactccacacgagttttgccactgctaagctgtgaggcagtgcaggctgggacagccgacctccaggttgcgaaaaacctggtttctgggacctcccaccccagagtaaaaagaacggagcctccgctaccaccctcccacgtggtggtagaaagacggggtctagaggttagaggagaccctccagggaacaaatagtgggaccatattgacgccagggaaagaccggagtggttctctgcttttcctccaggggtctgtgagcacagtttgctcaagaataagcagacctttggatgacaaacacaaaac

SEQ ID NO: 98 - DNA, 10827 bp, Artificial Sequence
  Synthetic sequence
agtaaatcctgtgtgctaattgaggtgcattggtctgcaaatcgagttgctaggcaataaacacatttggattaattttaatcgttcgttgagcgattagcagagaactgaccagaacatgtctggtcgtaaagctcagggaaaaaccctgggcgtcaatatggtacgacgaggagttcgctccttgtcaaacaaaataaaacaaaaaacaaaacaaattggaaacagacctggaccttcaagaggtgttcaaggatttatctttttctttttgttcaacattttgactggaaaaaagatcacagcccacctaaagaggttgtggaaaatgctggacccaagacaaggcttggctgttctaaggaaagtcaagagagtggtggccagtttgatgagaggattgtcctcaaggaaacgccgttcccatgatgttctgactgtgcaattcctaattttgggaatgctgttgatgacgggtggagtgaccttggtgcggaaaaacagatggttgctcctaaatgtgacatctgaggacctcgggaaaacattctctgtgggcacaggcaactgcacaacaaacattttggaagccaagtactggtgcccagactcaatggaatacaactgtcccaatctcagtccaagagaggagccagatgacattgattgctggtgctatggggtggaaaacgttagagtcgcatatggtaagtgtgactcagcaggcaggtctaggaggtcaagaagggccattgacttgcctacgcatgaaaaccatggtttgaagacccggcaagaaaaatggatgactggaagaatgggtgaaaggcaactccaaaagattgagagatggctcgtgaggaaccccttttttgcagtgacagctctgaccattgcctaccttgtgggaagcaacatgacgcaacgagtcgtgattgccctactggtcttggctgttggtccggcctactcagctcactgcattggaattactgacagggatttcattgagggggtgcatggaggaacttgggtttcagctaccctggagcaagacaagtgtgtcactgttatggcccctgacaagccttcattggacatctcactagagacagtagccattgatggacctgctgaggcgaggaaagtgtgttacaatgcagttctcactcatgtgaagattaatgacaagtgccccagcactggagaggcccacctagctgaagagaacgaaggggacaatgcgtgcaagcgcacttattctgatagaggctggggcaatggctgtggcctatttgggaaagggagcattgtggcatgcgccaaattcacttgtgccaaatccatgagtttgtttgaggttgatcagaccaaaattcagtatgtcatcagagcacaattgcatgtaggggccaagcaggaaaattggaataccgacattaagactctcaagtttgatgccctgtcaggctcccaggaagccgagttcactgggtatggaaaagctacactggaatgccaggtgcaaactgcggtggactttggtaacagttacatcgctgagatggaaaaagagagctggatagtggacagacagtgggcccaggacttgaccctgccatggcagagtggaagtggcggggtgtggagagagatgcatcatcttgtcgaatttgaacctccgcatgccgccactatcagagtactggccctgggaaaccaggaaggctccttgaaaacagctcttaccggcgcaatgagggttacaaaggacacaaatgacaacaacctttacaaactacatggtggacatgtttcctgcagagtgaaattgtcagctttgacactcaaggggacatcctacaaaatgtgcactgacaaaatgtcttttgtcaagaacccaactgacactggccatggcactgttgtgatgcaggtgaaagtgccaaaaggagccccctgcaagattccagtgatagtagctgatgatcttacagcggcaatcaataaaggcattttggttacagttaaccccatcgcctcaaccaatgatgatgaagtgctgattgaggtgaacccaccttttggagacagctacattatcgttgggacaggagattcacgtctcacttaccagtggcacaaagagggaagctcaataggaaagttgttcactcagaccatgaaaggcgcggaacgcctggccgtcatgggagacgccgcctgggatttcagctccgctggagggttcttcacttcggttgggaaaggaattcatacggtgtttggctctgcctttcaggggctatttggcggcttgaactggataacaaaggtcatcatgggggcggtactcatatgggttggcatcaacacaagaaacatgacaatgtccatgagcatgatcttggtaggagtgatcatgatgtttttgtctctaggagttggggcggatcaaggatgcgccatcaactttggcaagagagagctcaagtgcggagatggtatcttcatatttagagactctgatgactggctgaacaagtactcatactatccagaagatcctgtgaagctggcatcaatagtgaaagcctcttttgaagaagggaagtgtggcctaaattcagttgactcccttgagcatgagatgtggagaagcagggcagatgagatcaatgccattcttgaggaaaacgaggtggacatttctgttgtcgtgcaggatccaaagaatgtttaccagagaggaactcatccattttccagaattcgggatggtctgcagtatggttggaagacttggggtaagaaccttgtgttctccccagggaggaagaatggaagcttcatcatagatggaaagtccaggaaagaatgcccgttttcaaaccgggtctggaattctttccagatagaggagtttgggacgggagtgttcaccacacgcgtgtacatggacgcagtctttgaatacaccatagactgcgatggatctatcttgggtgcagcggtgaacggaaaaaagagtgcccatggctctccaacattttggatgggaagtcatgaagtaaatgggacatggatgatccacaccttggaggcattagattacaaggagtgtgagtggccactgacacatacgattggaacatcagttgaagagagtgaaatgttcatgccgagatcaatcggaggcccagttagctctcacaatcatatccctggatacaaggttcagacgaacggaccttggatgcaggtaccactagaggtgaagagagaagcttgcccagggactagcgtgatcattgatggcaactgtgatggacggggaaaatcaaccagatccaccacggatagcgggaaaattattcctgaatggtgttgccgctcctgcacaatgccgcctgtgagcttccatggtagtgatgggtgttggtatcccatggaaattaggccaaggaaaacgcatgaaagccatctggtgcgctcctgggttacagctggagaaatacatgctgtcccttttggtttggtgagcatgatgatagcaatggaagtggtcctaaggaaaagacagggaccaaagcaaatgttggttggaggagtggtgctcttgggagcaatgctggtcgggcaagtaactctccttgatttgctgaaactcacagtggctgtgggattgcatttccatgagatgaacaatggaggagacgccatgtatatggcgttgattgctgccttttcaatcagaccagggctgctcatcggctttgggctcaggaccctatggagccctcgggaacgccttgtgctgaccctaggagcagccatggtggagattgccttgggtggcatgatgggcggcctgtggaagtatctaaatgcagtttctctctgcatcctgacaataaatgctgttgcttctaggaaagcatcaaataccatcttgcccctcatggctctgttgacacctgtcactatggctgaggtgagacttgccacaatgctcttttgtaccgtggttatcataggggtccttcaccagaactccaaggacacctccatgcagaagactatacctctggtggccctcacactcacatcttacctgggcttgacacaaccttttttgggcctgtgtgcatttctggcaacccgcatatttgggcgaaggagtatcccagtgaatgaggcactcgcagcagctggtctagtgggagtgctggcaggactggcttttcaggagatggagaacttccttggtccgattgcagttggaggaatcctgatgatgctggttagcgtggctgggagggtggatgggctagagctcaagaagcttggtgaagtttcatgggaagaggaggcggagatcagcggaagttccgcccgctatgatgtggcactcagtgaacaaggggagttcaagctgctttctgaagagaaagtgccatgggaccaggttgtgatgacctcgctggccttggttggggctgccattcatccatttgctcttctgctggtccttgctgggtggctgtttcatgtcaggggagctaggagaagtggggatgtcttgtgggatattcccactcctaagatcattgaggaatgtgaacatctggaggatgggatttatggcatattccagtcaaccttcttgggggcctcccagcgaggagtgggagtggcacagggaggggtgttccacacaatgtggcatgtcacaagaggagctttccttgtcaggaatggcaagaagttgattccatcttgggcttcagtaaaggaagaccttgtcgcctatggtggctcatggaagttggaaggcagatgggatggagaggaagaggtccaattgatcgctgctgttccaggaaagaacgtggtcaacgtccagacaaaaccgagcttgttcaaagtgaggaatgggggagaaatcggggctgtcgctcttgactatccgagtggcacttcaggatctcctattgttaacaggaacggagaggtgattgggctgtacggcaatggcatccttgtcggtgacaactccttcgtgtccgccatatcccagactgaggtgaaggaagaaggaaaggaggagctccaagagatcccgacaatgctaaagaaaggaatgacaactatccttgattttcatcctggagctgggaagacaagacgttttctcccacagatcttggccgagtgcgcacggagacgcttgcgcactcttgtgttggcccccaccagggttgttctttctgaaatgaaggaggcttttcacggcctggacgtgaaattccacacacaggctttttccgctcacggcagcgggagagaagtcattgatgccatgtgccatgccaccctaacttacaggatgttggaaccaactagggttgttaactgggaagtgatcatcatggatgaagcccattttttggatccagctagcatagccgccagaggttgggcagcgcacagagctagggcaaatgaaagtgcaacaatcttgatgacagccacaccgcctgggactagtgatgaatttccacattcaaatggtgaaatagaagatgttcaaacggacatacccagtgagccctggaacacagggcatgactggatcctggctgacaaaaggcccacggcatggttccttccatccatcagagctgcaaatgtcatggctgcctctttgcgtaaggctggaaagagtgtggtggtcctgaacaggaaaacctttgagagagaataccccacgataaagcagaagaaacctgactttatattggccactgacatagctgaaatgggagccaacctttgcgtggagcgagtgctggattgcaggacggcttttaagcctgtgcttgtggatgaagggaggaaggtggcaataaaagggccacttcgcatctccgcatcctctgctgctcaaaggagggggcgcattgggagaaatcccaacagagatggagactcatactactattctgagcccacaagtgaagataatgcccaccacgtctgctggttggaggcctcaatgctcttggacaacatggaggtgaggggtggaatggtcgccccactctatggcgttgaaggaactaaaacaccagtttcccctggtgaaatgagactgagggatgaccagaggaaagtcttcagagaactagtgaggaattgtgacctgcccgtttggctttcgtggcaagtggccaaggctggtttgaagacgaatgatcgtaagtggtgttttgaaggccctgaggaacatgagatcttgaatgacagcggtgaaacagtgaagtgcagggctcctggaggagcaaagaagcctctgcgcccaaggtggtgtgatgaaagggtgtcatctgaccagagtgcgctgtctgaatttattaagtttgctgaaggtaggaggggagctgcggaagtgctagttgtgctgagtgaactccctgatttcctggctaaaaaaggtggagaggcaatggataccatcagtgtgtttctccactctgaggaaggctctagggcttaccgcaatgcactatcaatgatgcctgaggcaatgacaatagtcatgctgtttatactggctggactactgacatcgggaatggtcatctttttcatgtctcccaaaggcatcagtagaatgtctatggcgatgggcacaatggccggctgtggatatctcatgttccttggaggcgtcaaacccactcacatctcctatatcatgctcatattctttgtcctgatggtggttgtgatccccgagccagggcaacaaaggtccatccaagacaaccaagtggcatacctcattattggcatcctgacgctggtttcagtggtggcagccaacgagctaggcatgctggagaaaaccaaagaggacctctttgggaagaagaacttaattccatctagtgcttcaccctggagttggccggatcttgacctgaagccaggagctgcctggacagtgtacgttggcattgttacaatgctctctccaatgttgcaccactggatcaaagtcgaatatggcaacctgtctctgtctggaatagcccagtcagcctcagtcctttctttcatggacaaggggataccattcatgaagatgaatatctcggtcataatactgctggtcagtggctggaattcaataacagtgatgcctctgctctgtggcatagggtgcgccatgctccactggtctctcattttacctggaatcaaagcgcagcagtcaaagcttgcacagagaagggtgttccatggcgttgccaagaaccctgtggttgatgggaatccaacagttgacattgaggaagctcctgaaatgcctgccctttatgagaagaaactggctctatatctccttcttgctctcagcctagcttctgttgccatgtgcagaacgcccttttcattggctgaaggcattgtcctagcatcagctgccttagggccgctcatagagggaaacaccagccttctttggaatggacccatggctgtctccatgacaggagtcatgcgggggaattactatgcttttgtgggagtcatgtacaatctatggaagatgaaaactggacgccgggggagtgcgaatggaaaaactttgggtgaagtctggaagagggaactgaatctgttggacaagcaacagtttgagttgtataaaaggaccgacattgtggaggtggatcgtgatacggcacgcaggcatttggccgaagggaaggtggacaccggggtggcggtctccagggggaccgcaaagttaaggtggttccatgagcgtggctatgtcaagctggaaggtagggtgattgacctggggtgtggccgcggaggctggtgttactacgctgctgcgcaaaaggaagtgagtggggtcaaaggatttactcttggaagagacggccatgagaaacccatgaatgtgcaaagtctgggatggaacatcatcaccttcaaggacaaaactgatatccaccgcctagaaccagtgaaatgtgacacccttttgtgtgacattggagagtcatcatcgtcatcggtcacagagggggaaaggaccgtgagagttcttgatactgtagaaaaatggctggcttgtggggttgacaacttctgtgtgaaggtgttagctccatacatgccagatgttcttgagaaactggaattgctccaaaggaggtttggcggaacagtgatcaggaaccctctctccaggaattccactcatgaaatgtactacgtgtctggagcccgcagcaatgtcacatttactgtgaaccaaacatcccgcctcctgatgaggagaatgaggcgtccaactggaaaagtgaccctggaggctgacgtcatcctcccaattgggacacgcagtgttgagacagacaagggacccctggacaaagaggccatagaagaaagggttgagaggataaaatctgagtacatgacctcttggttttatgacaatgacaacccctacaggacctggcactactgtggctcctatgtcacaaaaacctcaggaagtgcggcgagcatggtaaatggtgttattaaaattctgacatacccatgggacaggatagaggaggtcacaagaatggcaatgactgacacaaccccttttggacagcaaagagtgtttaaagaaaaagttgacaccagagcaaaggatccaccagcgggaactaggaagatcatgaaagttgtcaacaggtggctgttccgccacctggccagagaaaagaaccccagactgtgcacaaaggaagaatttattgcaaaagtccgaagtcatgcagccattggagcttacctggaagaacaagaacagtggaagactgccaatgaggctgtccaagacccaaagttctgggaactggtggatgaagaaaggaagctgcaccaacaaggcaggtgtcggacttgtgtgtacaacatgatggggaaaagagagaagaagctgtcagagtttgggaaagcaaagggaagccgtgccatatggtatatgtggctgggagcgcggtatcttgagtttgaggccctgggattcctgaatgaggaccattgggcttccagggaaaactcaggaggaggagtggaaggcattggcttacaatacctaggatatgtgatcagagacctggctgcaatggatggtggtggattctacgcggatgacaccgctggatgggacacgcgcatcacagaggcagaccttgatgatgaacaggagatcttgaactacatgagcccacatcacaaaaaactggcacaagcagtgatggaaatgacatacaagaacaaagtggtgaaagtgttgagaccagccccaggagggaaagcctacatggatgtcataagtcgacgagaccagagaggatccgggcaggtagtgacttatgctctgaacaccatcaccaacttgaaagtccaattgatcagaatggcagaagcagagatggtgatacatcaccaacatgttcaagattgtgatgaatcagttctgaccaggctggaggcatggctcactgagcacggatgtaacagactgaagaggatggcggtgagtggagacgactgtgtggtccggcccatcgatgacaggttcggcctggccctgtcccatctcaacgccatgtccaaggttagaaaggacatatctgaatggcagccatcaaaagggtggaatgattgggagaatgtgcccttctgttcccaccacttccatgaactacagctgaaggatggcaggaggattgtggtgccttgccgagaacaggacgagctcattgggagaggaagggtgtctccaggaaacggctggatgatcaaggaaacagcttgcctcagcaaagcctatgccaacatgtggtcactgatgtattttcacaaaagggacatgaggctactgtcattggctgtttcctcagctgttcccacctcatgggttccacaaggacgcacaacatggtcgattcatgggaaaggggagtggatgaccacggaagacatgcttgaggtgtggaacagagtatggataaccaacaacccacacatgcaggacaagacaatggtgaaagaatggagagatgtcccttatctaaccaagagacaagacaagctgtgcggatcactgattggaatgaccaatagggccacctgggcctcccacatccatttggtcatccatcgtatccgaacgctgattggacaggagaaatatactgactacctaacagtcatggacagatattctgtggatgctgacctgcaaccgggtgagcttatctgaaacaccatctaataggaataaccgggatacaaaccacgggtggagaaccggactccccacaacttgaaaccgggatataaaccacggctggagaaccggactccgcacttaaaatgaaacagaaaccgggataaaaactacagaagaagttgtcagcccagaactccacacgagttttgccactgctaagctgtgaggcagtgcaggctgggacagccgacctccaggttgcgaaaaacctggtttctgggacctcccaccccagagtaaaaagaacggagcctccgctaccaccctcccacgtggtggtagaaagacggggtctagaggttagaggagaccctccagggaacaaatagtgggaccatattgacgccagggaaagaccggagtggttctctgcttttcctccaggggtctgtgagcacagtttgctcaagaataagcagacctttggatgacaaacacaaaac

SEQ ID NO: 99 - DNA, 8070 bp, Artificial Sequence
  Synthetic sequence
agtaaatcctgtgtgctaattgaggtgcattggtctgcaaatcgagttgctaggcaataaacacatttggattaattttaatcgttcgttgagcgattagcagagaactgaccagaacatgtctggtcgtaaagctcagggaaaaaccctgggcgtcaatatggtacgacgaggagttcgctccttgtcaaacaaaataaaacaaaaaacaaaacaaattggaaacagacctggaccttcaagaggtgttcaaggatttatctttttctttttgttaaatgggacatggatgatccacaccttggaggcattagattacaaggagtgtgagtggccactgacacatacgattggaacatcagttgaagagagtgaaatgttcatgccgagatcaatcggaggcccagttagctctcacaatcatatccctggatacaaggttcagacgaacggaccttggatgcaggtaccactagaagtgaagagagaagcttgcccagggactagcgtgatcattgatggcaactgtgatggacggggaaaatcaaccagatccaccacggatagcgggaaagttattcctgaatggtgttgccgctcctgcacaatgccgcctgtgagcttccatggtagtgatgggtgttggtatcccatggaaattaggccaaggaaaacgcatgaaagccatctggtgcgctcctgggttacagctggagaaatacatgctgtcccttttggtttggtgagcatgatgatagcaatggaagtggtcctaaggaaaagacagggaccaaagcaaatgttggttggaggagtagtgctcttgggagcaatgctggtcgggcaagtaactctccttgatttgctgaaactcacagtggctgtgggattgcatttccatgagatgaacaatggaggagacgccatgtatatggcgttgattgctgccttttcaatcagaccagggctgctcatcggctttgggctcaggaccctatggagccctcgggaacgccttgtgctgaccctaggagcagccatggtggagattgccttgggtggcgtgatgggcggcctgtggaagtatctaaatgcagtttctctctgcatcctgacaataaatgctgttgcttctaggaaagcatcaaataccatcttgcccctcatggctctgttgacacctgtcactatggctgaggtgagacttgccgcaatgttcttttgtgccatggttatcataggggtccttcaccagaatttcaaggacacctccatgcagaagactatacctctggtggccctcacactcacatcttacctgggcttgacacaaccttttttgggcctgtgtgcatttctggcaacccgcatatttgggcgaaggagtatcccagtgaatgaggcactcgcagcagctggtctagtgggagtgctggcaggactggcttttcaggagatggagaacttccttggtccgattgcagttggaggactcctgatgatgctggttagcgtggctgggagggtggatgggctagagctcaagaagcttggtgaagtttcatgggaagaggaggcggagatcagcgggagttccgcccgctatgatgtggcactcagtgaacaaggggagttcaagctgctttctgaagagaaagtgccatgggaccaggttgtgatgacctcgctggccttggttggggctgccctccatccatttgctcttctgctggtccttgctgggtggctgtttcatgtcaggggagctaggagaagtggggatgtcttgtgggatattcccactcctaagatcatcgaggaatgtgaacatctggaggatgggatttatggcatattccagtcaaccttcttgggggcctcccagcgaggagtgggagtggcacagggaggggtgttccacacaatgtggcatgtcacaagaggagctttccttgtcaggaatggcaagaagttgattccatcttgggcttcagtaaaggaagaccttgtcgcctatggtggctcatggaagttggaaggcagatgggatggagaggaagaggtccagttgatcgcggctgttccaggaaagaacgtggtcaacgtccagacaaaaccgagcttgttcaaagtgaggaatgggggagaaatcggggctgtcgctcttgactatccgagtggcacttcaggatctcctattgttaacaggaacggagaggtgattgggctgtacggcaatggcatccttgtcggtgacaactccttcgtgtccgccatatcccagactgaggtgaaggaagaaggaaaggaggagctccaagagatcccgacaatgctaaagaaaggaatgacaactgtccttgattttcatcctggagctgggaagacaagacgtttcctcccacagatcttggccgagtgcgcacggagacgcttgcgcactcttgtgttggcccccaccagggttgttctttctgaaatgaaggaggcttttcacggcctggacgtgaaattccacacacaggctttttccgctcacggcagcgggagagaagtcattgatgccatgtgccatgccaccctaacttacaggatgttggaaccaactagggttgttaactgggaagtgatcattatggatgaagcccattttttggatccagctagcatagccgctagaggttgggcagcgcacagagctagggcaaatgaaagtgcaacaatcttgatgacagccacaccgcctgggactagtgatgaatttccacattcaaatggtgaaatagaagatgttcaaacggacatacccagtgagccctggaacacagggcatgactggatcctggctgacaaaaggcccacggcatggttccttccatccatcagagctgcaaatgtcatggctgcctctttgcgtaaggctggaaagagtgtggtggtcctgaacaggaaaacctttgagagagaataccccacgataaagcagaagaaacctgactttatattggccactgacatagctgaaatgggagccaacctttgcgtggagcgagtgctggattgcaggacggcttttaagcctgtgcttgtggatgaagggaggaaggtggcaataaaagggccacttcgtatctccgcatcctctgctgctcaaaggagggggcgcattgggagaaatcccaacagagatggagactcatactactattctgagcctacaagtgaaaataatgcccaccacgtctgctggttggaggcctcaatgctcttggacaacatggaggtgaggggtggaatggtcgccccactctatggcgttgaaggaactaaaacaccagtttcccctggtgaaatgagactgagggatgaccagaggaaagtcttcagagaactagtgaggaattgtgacctgcccgtttggctttcgtggcaagtggccaaggctggtttgaagacgaatgatcgtaagtggtgttttgaaggccctgaggaacatgagatcttgaatgacagcggtgaaacagtgaagtgcagggctcctggaggagcaaagaagcctctgcgcccaaggtggtgtgatgaaagggtgtcatctgaccagagtgcgctgtctgaatttattaagtttgctgaaggtaggaggggagctgctgaagtgctagttgtgctgagtgaactccctgatttcctggctaaaaaaggtggagaggcaatggataccatcagtgtgttcctccactctgaggaaggctctagggcttaccgcaatgcactatcaatgatgcctgaggcaatgacaatagtcatgctgtttatactggctggactactgacatcgggaatggtcatctttttcatgtctcccaaaggcatcagtagaatgtctatggcgatgggcacaatggccggctgtggatatctcatgttccttggaggcgtcaaacccactcacatctcctatgtcatgctcatattctttgtcctgatggtggttgtgatccccgagccagggcaacaaaggtccatccaagacaaccaagtggcatacctcattattggcatcctgacgctggtttcagcggtggcagccaacgagctaggcatgctggagaaaaccaaagaggacctctttgggaagaagaacttaattccatctagtgcttcaccctggagttggccggatcttgacctgaagccaggagctgcctggacagtgtacgttggcattgttacaatgctctctccaatgttgcaccactggatcaaagtcgaatatggcaacctgtctctgtctggaatagcccagtcagcctcagtcctttctttcatggacaaggggataccattcatgaagatgaatatctcggtcataatgctgctggtcagtggctggaattcaataacagtgatgcctctgctctgtggcatagggtgcgccatgctccactggtctctcattttacctggaatcaaagcgcagcagtcaaagcttgcacagagaagggtgttccatggcgttgccaagaaccctgtggttgatgggaatccaacagttgacattgaggaagctcctgaaatgcctgccctttatgagaagaaactggctctatatctccttcttgctctcagcctagcttctgttgccatgtgcagaacgcccttttcattggctgaaggcattgtcctagcatcagctgccttagggccgctcatagagggaaacaccagccttctttggaatggacccatggctgtctccatgacaggagtcatgagggggaatcactatgcttttgtgggagtcatgtacaatctatggaagatgaaaactggacgccgggggagcgcgaatggaaaaactttgggtgaagtctggaagagggaactgaatctgttggacaagcgacagtttgagttgtataaaaggaccgacattgtggaggtggatcgtgatacggcacgcaggcatttggccgaagggaaggtggacaccggggtggcggtctccagggggaccgcaaagttaaggtggttccatgagcgtggctatgtcaagctggaaggtagggtgattgacctggggtgtggccgcggaggctggtgttactacgctgctgcgcaaaaggaagtgagtggggtcaaaggatttactcttggaagagacggccatgagaaacccatgaatgtgcaaagtctgggatggaacatcatcaccttcaaggacaaaactgatatccaccgcctagaaccagtgaaatgtgacacccttttgtgtgacattggagagtcatcatcgtcatcggtcacagagggggaaaggaccgtgagagttcttgatactgtagaaaaatggctggcttgtggggttgacaacttctgtgtgaaggtgttagctccatacatgccagatgttcttgagaaactggaattgctccaaaggaggtttggcggaacagtgatcaggaaccctctctccaggaattccactcatgaaatgtactacgtgtctggagcccgcagcaatgtcacatttactgtgaaccaaacatcccgcctcctgatgaggagaatgaggcgtccaactggaaaagtgaccctggaggctgacgtcatcctcccaattgggacacgcagtgttgagacagacaagggacccctggacaaagaggccatagaagaaagggttgagaggataaaatctgagtacatgacctcttggttttatgacaatgacaacccctacaggacctggcactactgtggctcctatgtcacaaaaacctcaggaagtgcggcgagcatggtaaatggtgttattaaaattctgacatatccatgggacaggatagaggaggtcacaagaatggcaatgactgacacaaccccttttggacagcaaagagtgtttaaagaaaaagttgacaccagagcaaaggatccaccagcgggaactaggaagatcatgaaagttgtcaacaggtggctgttccgccacctggccagagaaaagaaccccagactgtgcacaaaggaagaatttattgcaaaagtccgaagtcatgcagccattggagcttacctggaagaacaagaacagtggaagactgccaatgaggctgtccaagacccaaagttctgggaactggtggatgaagaaaggaagctgcaccaacaaggcaggtgtcggacttgtgtgtacaacatgatggggaaaagagagaagaagctgtcagagtttgggaaagcaaagggaagccgtgccatatggtatatgtggctgggagcgcggtatcttgagtttgaggccctgggattcctgaatgaggaccattgggcttccagggaaaactcaggaggaggagtggaaggcattggcttacaatacctaggatatgtgatcagagacctggctgcaatggatggtggtggattctacgcggatgacaccgctggatgggacacgcgcatcacagaggcagaccttgatgatgaacaggagatcttgaactacatgagcccacatcacaaaaaactggcacaagcagtgatggaaatgacatacaagaacaaagtggtgaaagtgttgagaccagccccaggagggaaagcctacatggatgtcataagtcgacgagaccagagaggatccgggcaggtagtgacttatgctctgaacaccatcaccaacttgaaagtccaattgatcagaatggcagaagcagagatggtgatacatcaccaacatgttcaagattgtgatgaatcagttctgaccaggctggaggcatggctcactgagcacggatgtgacagactgaagaggatggcggtgagtggagacgactgtgtggtccggcccatcgatgacaggttcggcctggccctgtcccatctcaacgccatgtccaaggttagaaaggacatatctgaatggcagccatcaaaagggtggaatgattgggagaatgtgcccttctgttcccaccacttccatgaactacagctgaaggatggcaggaggattgtggtgccttgccgagaacaggacgagctcattgggagaggaagggtgtctccaggaaacggctggatgatcaaggaaacagcttgcctcagcaaagcctatgccaacatgtggtcactgatgtattttcacaaaagggacatgaggctactgtcattggctgtttcctcagctgttcccacctcatgggttccacaaggacgcacaacatggtcgattcatgggaaaggggagtggatgaccacggaagacatgcttgaggtgtggaacagagtatggataaccaacaacccacacatgcaggacaagacaatggtgaaaaaatggagagatgtcccttatctaaccaagagacaagacaagctgtgcggatcactgattggaatgaccaatagggccacctgggcctcccacatccatttagtcatccatcgtatccgaacgctgattggacaggagaaatacactgactacctaacagtcatggacaggtattctgtggatgctgacctgcaactgggtgagcttatctgaaacaccatctaacaggaataaccgggatacaaaccacgggtggagaaccggactccccacaacctgaaaccgggatataaaccacggctggagaaccggactccgcacttaaaatgaaacagaaaccgggataaaaactacggatggagaaccggactccacacattgagacagaagaagttgtcagcccagaaccccacacgagttttgccactgctaagctgtgaggcagtgcaggctgggacagccgacctccaggttgcgaaaaacctggtttctgggacctcccaccccagagtaaaaagaacggagcctccgctaccaccctcccacgtggtggtagaaagacggggtctagaggttagaggagaccctccagggaacaaatagtgggaccatattgacgccagggaaagaccggagtggttctctgcttttcctccagaggtctgtgagcacagtttgctcaagaataagcagacctttggatgacaaacacaaaaccactcgag

SEQ ID NO: 100 - DNA, 8142 bp, Artificial Sequence
  Synthetic sequence
agtaaatcctgtgtgctaattgaggtgcattggtctgcaaatcgagttgctaggcaataaacacatttggattaattttaatcgttcgttgagcgattagcagagaactgaccagaacatgtctggtcgtaaagctcagggaaaaaccctgggcgtcaatatggtacgacgaggagttcgctccttgtcaaacaaaataaaacaaaaaacaaaacaaattggaaacagacctggaccttcaagaggtgttcaaggatttatctttttctttttgttcaacattttgactggaaaaaagatcacagcccacctaaagaggttgtggaaaatgctggacccaagacaaggcttggctgttctaaggaaagtcaagagagtggtggccagtttgatgagaggattgtcctcaaggaaacgccgttcccatgatgttctgactgtgcaattcctaattttgggaatgctgttgatgacgggtggagtgaccttggtgcggaaaaacagatggttgctcctaaatgtgacatctgaggacctcgggaaaacattctctgtgggcacaggcaactgcacaacaaacattttggaagccaagtactggtgcccagactcaatggaatacaactgtcccaatctcagtccaagagatattcctgaatggtgttgccgctcctgcacaatgccgcctgtgagcttccatggtagtgatgggtgttggtatcccatggaaattaggccaaggaaaacgcatgaaagccatctggtgcgctcctgggttacagctggagaaatacatgctgtcccttttggtttggtgagcatgatgatagcaatggaagtggtcctaaggaaaagacagggaccaaagcaaatgttggttggaggagtagtgctcttgggagcaatgctggtcgggcaagtaactctccttgatttgctgaaactcacagtggctgtgggattgcatttccatgagatgaacaatggaggagacgccatgtatatggcgttgattgctgccttttcaatcagaccagggctgctcatcggctttgggctcaggaccctatggagccctcgggaacgccttgtgctgaccctaggagcagccatggtggagattgccttgggtggcgtgatgggcggcctgtggaagtatctaaatgcagtttctctctgcatcctgacaataaatgctgttgcttctaggaaagcatcaaataccatcttgcccctcatggctctgttgacacctgtcactatggctgaggtgagacttgccgcaatgttcttttgtgccatggttatcataggggtccttcaccagaatttcaaggacacctccatgcagaagactatacctctggtggccctcacactcacatcttacctgggcttgacacaaccttttttgggcctgtgtgcatttctggcaacccgcatatttgggcgaaggagtatcccagtgaatgaggcactcgcagcagctggtctagtgggagtgctggcaggactggcttttcaggagatggagaacttccttggtccgattgcagttggaggactcctgatgatgctggttagcgtggctgggagggtggatgggctagagctcaagaagcttggtgaagtttcatgggaagaggaggcggagatcagcgggagttccgcccgctatgatgtggcactcagtgaacaaggggagttcaagctgctttctgaagagaaagtgccatgggaccaggttgtgatgacctcgctggccttggttggggctgccctccatccatttgctcttctgctggtccttgctgggtggctgtttcatgtcaggggagctaggagaagtggggatgtcttgtgggatattcccactcctaagatcatcgaggaatgtgaacatctggaggatgggatttatggcatattccagtcaaccttcttgggggcctcccagcgaggagtgggagtggcacagggaggggtgttccacacaatgtggcatgtcacaagaggagctttccttgtcaggaatggcaagaagttgattccatcttgggcttcagtaaaggaagaccttgtcgcctatggtggctcatggaagttggaaggcagatgggatggagaggaagaggtccagttgatcgcggctgttccaggaaagaacgtggtcaacgtccagacaaaaccgagcttgttcaaagtgaggaatgggggagaaatcggggctgtcgctcttgactatccgagtggcacttcaggatctcctattgttaacaggaacggagaggtgattgggctgtacggcaatggcatccttgtcggtgacaactccttcgtgtccgccatatcccagactgaggtgaaggaagaaggaaaggaggagctccaagagatcccgacaatgctaaagaaaggaatgacaactgtccttgattttcatcctggagctgggaagacaagacgtttcctcccacagatcttggccgagtgcgcacggagacgcttgcgcactcttgtgttggcccccaccagggttgttctttctgaaatgaaggaggcttttcacggcctggacgtgaaattccacacacaggctttttccgctcacggcagcgggagagaagtcattgatgccatgtgccatgccaccctaacttacaggatgttggaaccaactagggttgttaactgggaagtgatcattatggatgaagcccattttttggatccagctagcatagccgctagaggttgggcagcgcacagagctagggcaaatgaaagtgcaacaatcttgatgacagccacaccgcctgggactagtgatgaatttccacattcaaatggtgaaatagaagatgttcaaacggacatacccagtgagccctggaacacagggcatgactggatcctggctgacaaaaggcccacggcatggttccttccatccatcagagctgcaaatgtcatggctgcctctttgcgtaaggctggaaagagtgtggtggtcctgaacaggaaaacctttgagagagaataccccacgataaagcagaagaaacctgactttatattggccactgacatagctgaaatgggagccaacctttgcgtggagcgagtgctggattgcaggacggcttttaagcctgtgcttgtggatgaagggaggaaggtggcaataaaagggccacttcgtatctccgcatcctctgctgctcaaaggagggggcgcattgggagaaatcccaacagagatggagactcatactactattctgagcctacaagtgaaaataatgcccaccacgtctgctggttggaggcctcaatgctcttggacaacatggaggtgaggggtggaatggtcgccccactctatggcgttgaaggaactaaaacaccagtttcccctggtgaaatgagactgagggatgaccagaggaaagtcttcagagaactagtgaggaattgtgacctgcccgtttggctttcgtggcaagtggccaaggctggtttgaagacgaatgatcgtaagtggtgttttgaaggccctgaggaacatgagatcttgaatgacagcggtgaaacagtgaagtgcagggctcctggaggagcaaagaagcctctgcgcccaaggtggtgtgatgaaagggtgtcatctgaccagagtgcgctgtctgaatttattaagtttgctgaaggtaggaggggagctgctgaagtgctagttgtgctgagtgaactccctgatttcctggctaaaaaaggtggagaggcaatggataccatcagtgtgttcctccactctgaggaaggctctagggcttaccgcaatgcactatcaatgatgcctgaggcaatgacaatagtcatgctgtttatactggctggactactgacatcgggaatggtcatctttttcatgtctcccaaaggcatcagtagaatgtctatggcgatgggcacaatggccggctgtggatatctcatgttccttggaggcgtcaaacccactcacatctcctatgtcatgctcatattctttgtcctgatggtggttgtgatccccgagccagggcaacaaaggtccatccaagacaaccaagtggcatacctcattattggcatcctgacgctggtttcagcggtggcagccaacgagctaggcatgctggagaaaaccaaagaggacctctttgggaagaagaacttaattccatctagtgcttcaccctggagttggccggatcttgacctgaagccaggagctgcctggacagtgtacgttggcattgttacaatgctctctccaatgttgcaccactggatcaaagtcgaatatggcaacctgtctctgtctggaatagcccagtcagcctcagtcctttctttcatggacaaggggataccattcatgaagatgaatatctcggtcataatgctgctggtcagtggctggaattcaataacagtgatgcctctgctctgtggcatagggtgcgccatgctccactggtctctcattttacctggaatcaaagcgcagcagtcaaagcttgcacagagaagggtgttccatggcgttgccaagaaccctgtggttgatgggaatccaacagttgacattgaggaagctcctgaaatgcctgccctttatgagaagaaactggctctatatctccttcttgctctcagcctagcttctgttgccatgtgcagaacgcccttttcattggctgaaggcattgtcctagcatcagctgccttagggccgctcatagagggaaacaccagccttctttggaatggacccatggctgtctccatgacaggagtcatgagggggaatcactatgcttttgtgggagtcatgtacaatctatggaagatgaaaactggacgccgggggagcgcgaatggaaaaactttgggtgaagtctggaagagggaactgaatctgttggacaagcgacagtttgagttgtataaaaggaccgacattgtggaggtggatcgtgatacggcacgcaggcatttggccgaagggaaggtggacaccggggtggcggtctccagggggaccgcaaagttaaggtggttccatgagcgtggctatgtcaagctggaaggtagggtgattgacctggggtgtggccgcggaggctggtgttactacgctgctgcgcaaaaggaagtgagtggggtcaaaggatttactcttggaagagacggccatgagaaacccatgaatgtgcaaagtctgggatggaacatcatcaccttcaaggacaaaactgatatccaccgcctagaaccagtgaaatgtgacacccttttgtgtgacattggagagtcatcatcgtcatcggtcacagagggggaaaggaccgtgagagttcttgatactgtagaaaaatggctggcttgtggggttgacaacttctgtgtgaaggtgttagctccatacatgccagatgttcttgagaaactggaattgctccaaaggaggtttggcggaacagtgatcaggaaccctctctccaggaattccactcatgaaatgtactacgtgtctggagcccgcagcaatgtcacatttactgtgaaccaaacatcccgcctcctgatgaggagaatgaggcgtccaactggaaaagtgaccctggaggctgacgtcatcctcccaattgggacacgcagtgttgagacagacaagggacccctggacaaagaggccatagaagaaagggttgagaggataaaatctgagtacatgacctcttggttttatgacaatgacaacccctacaggacctggcactactgtggctcctatgtcacaaaaacctcaggaagtgcggcgagcatggtaaatggtgttattaaaattctgacatatccatgggacaggatagaggaggtcacaagaatggcaatgactgacacaaccccttttggacagcaaagagtgtttaaagaaaaagttgacaccagagcaaaggatccaccagcgggaactaggaagatcatgaaagttgtcaacaggtggctgttccgccacctggccagagaaaagaaccccagactgtgcacaaaggaagaatttattgcaaaagtccgaagtcatgcagccattggagcttacctggaagaacaagaacagtggaagactgccaatgaggctgtccaagacccaaagttctgggaactggtggatgaagaaaggaagctgcaccaacaaggcaggtgtcggacttgtgtgtacaacatgatggggaaaagagagaagaagctgtcagagtttgggaaagcaaagggaagccgtgccatatggtatatgtggctgggagcgcggtatcttgagtttgaggccctgggattcctgaatgaggaccattgggcttccagggaaaactcaggaggaggagtggaaggcattggcttacaatacctaggatatgtgatcagagacctggctgcaatggatggtggtggattctacgcggatgacaccgctggatgggacacgcgcatcacagaggcagaccttgatgatgaacaggagatcttgaactacatgagcccacatcacaaaaaactggcacaagcagtgatggaaatgacatacaagaacaaagtggtgaaagtgttgagaccagccccaggagggaaagcctacatggatgtcataagtcgacgagaccagagaggatccgggcaggtagtgacttatgctctgaacaccatcaccaacttgaaagtccaattgatcagaatggcagaagcagagatggtgatacatcaccaacatgttcaagattgtgatgaatcagttctgaccaggctggaggcatggctcactgagcacggatgtgacagactgaagaggatggcggtgagtggagacgactgtgtggtccggcccatcgatgacaggttcggcctggccctgtcccatctcaacgccatgtccaaggttagaaaggacatatctgaatggcagccatcaaaagggtggaatgattgggagaatgtgcccttctgttcccaccacttccatgaactacagctgaaggatggcaggaggattgtggtgccttgccgagaacaggacgagctcattgggagaggaagggtgtctccaggaaacggctggatgatcaaggaaacagcttgcctcagcaaagcctatgccaacatgtggtcactgatgtattttcacaaaagggacatgaggctactgtcattggctgtttcctcagctgttcccacctcatgggttccacaaggacgcacaacatggtcgattcatgggaaaggggagtggatgaccacggaagacatgcttgaggtgtggaacagagtatggataaccaacaacccacacatgcaggacaagacaatggtgaaaaaatggagagatgtcccttatctaaccaagagacaagacaagctgtgcggatcactgattggaatgaccaatagggccacctgggcctcccacatccatttagtcatccatcgtatccgaacgctgattggacaggagaaatacactgactacctaacagtcatggacaggtattctgtggatgctgacctgcaactgggtgagcttatctgaaacaccatctaacaggaataaccgggatacaaaccacgggtggagaaccggactccccacaacctgaaaccgggatataaaccacggctggagaaccggactccgcacttaaaatgaaacagaaaccgggataaaaactacggatggagaaccggactccacacattgagacagaagaagttgtcagcccagaaccccacacgagttttgccactgctaagctgtgaggcagtgcaggctgggacagccgacctccaggttgcgaaaaacctggtttctgggacctcccaccccagagtaaaaagaacggagcctccgctaccaccctcccacgtggtggtagaaagacggggtctagaggttagaggagaccctccagggaacaaatagtgggaccatattgacgccagggaaagaccggagtggttctctgcttttcctccagaggtctgtgagcacagtttgctcaagaataagcagacctttggatgacaaacacaaaaccactcgag

SEQ ID NO: 101 - DNA, 8718 bp, Artificial Sequence
  Synthetic sequence
agtaaatcctgtgtgctaattgaggtgcattggtctgcaaatcgagttgctaggcaataaacacatttggattaattttaatcgttcgttgagcgattagcagagaactgaccagaacatgtctggtcgtaaagctcagggaaaaaccctgggcgtcaatatggtacgacgaggagttcgctccttgtcaaacaaaataaaacaaaaaacaaaacaaattggaaacagacctggaccttcaagaggtgttcaaggatttatctttttctttttgttcaacattttgactggaaaaaagatcacagcccacctaaagaggttgtggaaaatgctggacccaagacaaggcttggctgttctaaggaaagtcaagagagtggtggccagtttgatgagaggattgtcctcaaggaaacgccgttcccatgatgttctgactgtgcaattcctaattttgggaatgctgttgatgacgggtggagtgaccttggtgcggaaaaacagatggttgctcctaaatgtgacatctgaggacctcgggaaaacattctctgtgggcacaggcaactgcacaacaaacattttggaagccaagtactggtgcccagactcaatggaatacaactgtcccaatctcagtccaagagaggagccagatgacattgattgctggtgctatggggtggaaaacgttagagtcgcatatggtaagtgtgactcagcaggcaggtctaggaggtcaagaagggccattgacttgcctacgcatgaagagtttgggacgggagtgttcaccacacgcgtgtacatggacgcagtctttgaatacaccatagactgcgatggatctatcttgggtgcagcggtgaacggaaaaaagagtgcccatggctctccaacattttggatgggaagtcatgaagtaaatgggacatggatgatccacaccttggaggcattagattacaaggagtgtgagtggccactgacacatacgattggaacatcagttgaagagagtgaaatgttcatgccgagatcaatcggaggcccagttagctctcacaatcatatccctggatacaaggttcagacgaacggaccttggatgcaggtaccactagaagtgaagagagaagcttgcccagggactagcgtgatcattgatggcaactgtgatggacggggaaaatcaaccagatccaccacggatagcgggaaagttattcctgaatggtgttgccgctcctgcacaatgccgcctgtgagcttccatggtagtgatgggtgttggtatcccatggaaattaggccaaggaaaacgcatgaaagccatctggtgcgctcctgggttacagctggagaaatacatgctgtcccttttggtttggtgagcatgatgatagcaatggaagtggtcctaaggaaaagacagggaccaaagcaaatgttggttggaggagtagtgctcttgggagcaatgctggtcgggcaagtaactctccttgatttgctgaaactcacagtggctgtgggattgcatttccatgagatgaacaatggaggagacgccatgtatatggcgttgattgctgccttttcaatcagaccagggctgctcatcggctttgggctcaggaccctatggagccctcgggaacgccttgtgctgaccctaggagcagccatggtggagattgccttgggtggcgtgatgggcggcctgtggaagtatctaaatgcagtttctctctgcatcctgacaataaatgctgttgcttctaggaaagcatcaaataccatcttgcccctcatggctctgttgacacctgtcactatggctgaggtgagacttgccgcaatgttcttttgtgccatggttatcataggggtccttcaccagaatttcaaggacacctccatgcagaagactatacctctggtggccctcacactcacatcttacctgggcttgacacaaccttttttgggcctgtgtgcatttctggcaacccgcatatttgggcgaaggagtatcccagtgaatgaggcactcgcagcagctggtctagtgggagtgctggcaggactggcttttcaggagatggagaacttccttggtccgattgcagttggaggactcctgatgatgctggttagcgtggctgggagggtggatgggctagagctcaagaagcttggtgaagtttcatgggaagaggaggcggagatcagcgggagttccgcccgctatgatgtggcactcagtgaacaaggggagttcaagctgctttctgaagagaaagtgccatgggaccaggttgtgatgacctcgctggccttggttggggctgccctccatccatttgctcttctgctggtccttgctgggtggctgtttcatgtcaggggagctaggagaagtggggatgtcttgtgggatattcccactcctaagatcatcgaggaatgtgaacatctggaggatgggatttatggcatattccagtcaaccttcttgggggcctcccagcgaggagtgggagtggcacagggaggggtgttccacacaatgtggcatgtcacaagaggagctttccttgtcaggaatggcaagaagttgattccatcttgggcttcagtaaaggaagaccttgtcgcctatggtggctcatggaagttggaaggcagatgggatggagaggaagaggtccagttgatcgcggctgttccaggaaagaacgtggtcaacgtccagacaaaaccgagcttgttcaaagtgaggaatgggggagaaatcggggctgtcgctcttgactatccgagtggcacttcaggatctcctattgttaacaggaacggagaggtgattgggctgtacggcaatggcatccttgtcggtgacaactccttcgtgtccgccatatcccagactgaggtgaaggaagaaggaaaggaggagctccaagagatcccgacaatgctaaagaaaggaatgacaactgtccttgattttcatcctggagctgggaagacaagacgtttcctcccacagatcttggccgagtgcgcacggagacgcttgcgcactcttgtgttggcccccaccagggttgttctttctgaaatgaaggaggcttttcacggcctggacgtgaaattccacacacaggctttttccgctcacggcagcgggagagaagtcattgatgccatgtgccatgccaccctaacttacaggatgttggaaccaactagggttgttaactgggaagtgatcattatggatgaagcccattttttggatccagctagcatagccgctagaggttgggcagcgcacagagctagggcaaatgaaagtgcaacaatcttgatgacagccacaccgcctgggactagtgatgaatttccacattcaaatggtgaaatagaagatgttcaaacggacatacccagtgagccctggaacacagggcatgactggatcctggctgacaaaaggcccacggcatggttccttccatccatcagagctgcaaatgtcatggctgcctctttgcgtaaggctggaaagagtgtggtggtcctgaacaggaaaacctttgagagagaataccccacgataaagcagaagaaacctgactttatattggccactgacatagctgaaatgggagccaacctttgcgtggagcgagtgctggattgcaggacggcttttaagcctgtgcttgtggatgaagggaggaaggtggcaataaaagggccacttcgtatctccgcatcctctgctgctcaaaggagggggcgcattgggagaaatcccaacagagatggagactcatactactattctgagcctacaagtgaaaataatgcccaccacgtctgctggttggaggcctcaatgctcttggacaacatggaggtgaggggtggaatggtcgccccactctatggcgttgaaggaactaaaacaccagtttcccctggtgaaatgagactgagggatgaccagaggaaagtcttcagagaactagtgaggaattgtgacctgcccgtttggctttcgtggcaagtggccaaggctggtttgaagacgaatgatcgtaagtggtgttttgaaggccctgaggaacatgagatcttgaatgacagcggtgaaacagtgaagtgcagggctcctggaggagcaaagaagcctctgcgcccaaggtggtgtgatgaaagggtgtcatctgaccagagtgcgctgtctgaatttattaagtttgctgaaggtaggaggggagctgctgaagtgctagttgtgctgagtgaactccctgatttcctggctaaaaaaggtggagaggcaatggataccatcagtgtgttcctccactctgaggaaggctctagggcttaccgcaatgcactatcaatgatgcctgaggcaatgacaatagtcatgctgtttatactggctggactactgacatcgggaatggtcatctttttcatgtctcccaaaggcatcagtagaatgtctatggcgatgggcacaatggccggctgtggatatctcatgttccttggaggcgtcaaacccactcacatctcctatgtcatgctcatattctttgtcctgatggtggttgtgatccccgagccagggcaacaaaggtccatccaagacaaccaagtggcatacctcattattggcatcctgacgctggtttcagcggtggcagccaacgagctaggcatgctggagaaaaccaaagaggacctctttgggaagaagaacttaattccatctagtgcttcaccctggagttggccggatcttgacctgaagccaggagctgcctggacagtgtacgttggcattgttacaatgctctctccaatgttgcaccactggatcaaagtcgaatatggcaacctgtctctgtctggaatagcccagtcagcctcagtcctttctttcatggacaaggggataccattcatgaagatgaatatctcggtcataatgctgctggtcagtggctggaattcaataacagtgatgcctctgctctgtggcatagggtgcgccatgctccactggtctctcattttacctggaatcaaagcgcagcagtcaaagcttgcacagagaagggtgttccatggcgttgccaagaaccctgtggttgatgggaatccaacagttgacattgaggaagctcctgaaatgcctgccctttatgagaagaaactggctctatatctccttcttgctctcagcctagcttctgttgccatgtgcagaacgcccttttcattggctgaaggcattgtcctagcatcagctgccttagggccgctcatagagggaaacaccagccttctttggaatggacccatggctgtctccatgacaggagtcatgagggggaatcactatgcttttgtgggagtcatgtacaatctatggaagatgaaaactggacgccgggggagcgcgaatggaaaaactttgggtgaagtctggaagagggaactgaatctgttggacaagcgacagtttgagttgtataaaaggaccgacattgtggaggtggatcgtgatacggcacgcaggcatttggccgaagggaaggtggacaccggggtggcggtctccagggggaccgcaaagttaaggtggttccatgagcgtggctatgtcaagctggaaggtagggtgattgacctggggtgtggccgcggaggctggtgttactacgctgctgcgcaaaaggaagtgagtggggtcaaaggatttactcttggaagagacggccatgagaaacccatgaatgtgcaaagtctgggatggaacatcatcaccttcaaggacaaaactgatatccaccgcctagaaccagtgaaatgtgacacccttttgtgtgacattggagagtcatcatcgtcatcggtcacagagggggaaaggaccgtgagagttcttgatactgtagaaaaatggctggcttgtggggttgacaacttctgtgtgaaggtgttagctccatacatgccagatgttcttgagaaactggaattgctccaaaggaggtttggcggaacagtgatcaggaaccctctctccaggaattccactcatgaaatgtactacgtgtctggagcccgcagcaatgtcacatttactgtgaaccaaacatcccgcctcctgatgaggagaatgaggcgtccaactggaaaagtgaccctggaggctgacgtcatcctcccaattgggacacgcagtgttgagacagacaagggacccctggacaaagaggccatagaagaaagggttgagaggataaaatctgagtacatgacctcttggttttatgacaatgacaacccctacaggacctggcactactgtggctcctatgtcacaaaaacctcaggaagtgcggcgagcatggtaaatggtgttattaaaattctgacatatccatgggacaggatagaggaggtcacaagaatggcaatgactgacacaaccccttttggacagcaaagagtgtttaaagaaaaagttgacaccagagcaaaggatccaccagcgggaactaggaagatcatgaaagttgtcaacaggtggctgttccgccacctggccagagaaaagaaccccagactgtgcacaaaggaagaatttattgcaaaagtccgaagtcatgcagccattggagcttacctggaagaacaagaacagtggaagactgccaatgaggctgtccaagacccaaagttctgggaactggtggatgaagaaaggaagctgcaccaacaaggcaggtgtcggacttgtgtgtacaacatgatggggaaaagagagaagaagctgtcagagtttgggaaagcaaagggaagccgtgccatatggtatatgtggctgggagcgcggtatcttgagtttgaggccctgggattcctgaatgaggaccattgggcttccagggaaaactcaggaggaggagtggaaggcattggcttacaatacctaggatatgtgatcagagacctggctgcaatggatggtggtggattctacgcggatgacaccgctggatgggacacgcgcatcacagaggcagaccttgatgatgaacaggagatcttgaactacatgagcccacatcacaaaaaactggcacaagcagtgatggaaatgacatacaagaacaaagtggtgaaagtgttgagaccagccccaggagggaaagcctacatggatgtcataagtcgacgagaccagagaggatccgggcaggtagtgacttatgctctgaacaccatcaccaacttgaaagtccaattgatcagaatggcagaagcagagatggtgatacatcaccaacatgttcaagattgtgatgaatcagttctgaccaggctggaggcatggctcactgagcacggatgtgacagactgaagaggatggcggtgagtggagacgactgtgtggtccggcccatcgatgacaggttcggcctggccctgtcccatctcaacgccatgtccaaggttagaaaggacatatctgaatggcagccatcaaaagggtggaatgattgggagaatgtgcccttctgttcccaccacttccatgaactacagctgaaggatggcaggaggattgtggtgccttgccgagaacaggacgagctcattgggagaggaagggtgtctccaggaaacggctggatgatcaaggaaacagcttgcctcagcaaagcctatgccaacatgtggtcactgatgtattttcacaaaagggacatgaggctactgtcattggctgtttcctcagctgttcccacctcatgggttccacaaggacgcacaacatggtcgattcatgggaaaggggagtggatgaccacggaagacatgcttgaggtgtggaacagagtatggataaccaacaacccacacatgcaggacaagacaatggtgaaaaaatggagagatgtcccttatctaaccaagagacaagacaagctgtgcggatcactgattggaatgaccaatagggccacctgggcctcccacatccatttagtcatccatcgtatccgaacgctgattggacaggagaaatacactgactacctaacagtcatggacaggtattctgtggatgctgacctgcaactgggtgagcttatctgaaacaccatctaacaggaataaccgggatacaaaccacgggtggagaaccggactccccacaacctgaaaccgggatataaaccacggctggagaaccggactccgcacttaaaatgaaacagaaaccgggataaaaactacggatggagaaccggactccacacattgagacagaagaagttgtcagcccagaaccccacacgagttttgccactgctaagctgtgaggcagtgcaggctgggacagccgacctccaggttgcgaaaaacctggtttctgggacctcccaccccagagtaaaaagaacggagcctccgctaccaccctcccacgtggtggtagaaagacggggtctagaggttagaggagaccctccagggaacaaatagtgggaccatattgacgccagggaaagaccggagtggttctctgcttttcctccagaggtctgtgagcacagtttgctcaagaataagcagacctttggatgacaaacacaaaaccactcgag

SEQ ID NO: 102 - DNA, 8358 bp, Artificial Sequence
  Synthetic sequence
agtaaatcctgtgtgctaattgaggtgcattggtctgcaaatcgagttgctaggcaataaacacatttggattaattttaatcgttcgttgagcgattagcagagaactgaccagaacatgtctggtcgtaaagctcagggaaaaaccctgggcgtcaatatggtacgacgaggagttcgctccttgtcaaacaaaataaaacaaaaaacaaaacaaattggaaacagacctggaccttcaagaggtgttcaaggatttatctttttctttttgttcaacattttgactggaaaaaagatcacagcccacctaaagaggttgtggaaaatgctggacccaagacaaggcttggctgttctaaggaaagtcaagagagtggtggccagtttgatgagaggattgtcctcaaggaaacgccgttcccatgatgttctgactgtgcaattcctaattttgggaatgctgttgatgacgggtggagtgaccttggtgcggaaaaacagatggttgctcctaaatgtgacatctgaggacctcgggaaaacattctctgtgggcacaggcaactgcacaacaaacattttggaagccaagtactggtgcccagactcaatggaatggccactgacacatacgattggaacatcagttgaagagagtgaaatgttcatgccgagatcaatcggaggcccagttagctctcacaatcatatccctggatacaaggttcagacgaacggaccttggatgcaggtaccactagaagtgaagagagaagcttgcccagggactagcgtgatcattgatggcaactgtgatggacggggaaaatcaaccagatccaccacggatagcgggaaagttattcctgaatggtgttgccgctcctgcacaatgccgcctgtgagcttccatggtagtgatgggtgttggtatcccatggaaattaggccaaggaaaacgcatgaaagccatctggtgcgctcctgggttacagctggagaaatacatgctgtcccttttggtttggtgagcatgatgatagcaatggaagtggtcctaaggaaaagacagggaccaaagcaaatgttggttggaggagtagtgctcttgggagcaatgctggtcgggcaagtaactctccttgatttgctgaaactcacagtggctgtgggattgcatttccatgagatgaacaatggaggagacgccatgtatatggcgttgattgctgccttttcaatcagaccagggctgctcatcggctttgggctcaggaccctatggagccctcgggaacgccttgtgctgaccctaggagcagccatggtggagattgccttgggtggcgtgatgggcggcctgtggaagtatctaaatgcagtttctctctgcatcctgacaataaatgctgttgcttctaggaaagcatcaaataccatcttgcccctcatggctctgttgacacctgtcactatggctgaggtgagacttgccgcaatgttcttttgtgccatggttatcataggggtccttcaccagaatttcaaggacacctccatgcagaagactatacctctggtggccctcacactcacatcttacctgggcttgacacaaccttttttgggcctgtgtgcatttctggcaacccgcatatttgggcgaaggagtatcccagtgaatgaggcactcgcagcagctggtctagtgggagtgctggcaggactggcttttcaggagatggagaacttccttggtccgattgcagttggaggactcctgatgatgctggttagcgtggctgggagggtggatgggctagagctcaagaagcttggtgaagtttcatgggaagaggaggcggagatcagcgggagttccgcccgctatgatgtggcactcagtgaacaaggggagttcaagctgctttctgaagagaaagtgccatgggaccaggttgtgatgacctcgctggccttggttggggctgccctccatccatttgctcttctgctggtccttgctgggtggctgtttcatgtcaggggagctaggagaagtggggatgtcttgtgggatattcccactcctaagatcatcgaggaatgtgaacatctggaggatgggatttatggcatattccagtcaaccttcttgggggcctcccagcgaggagtgggagtggcacagggaggggtgttccacacaatgtggcatgtcacaagaggagctttccttgtcaggaatggcaagaagttgattccatcttgggcttcagtaaaggaagaccttgtcgcctatggtggctcatggaagttggaaggcagatgggatggagaggaagaggtccagttgatcgcggctgttccaggaaagaacgtggtcaacgtccagacaaaaccgagcttgttcaaagtgaggaatgggggagaaatcggggctgtcgctcttgactatccgagtggcacttcaggatctcctattgttaacaggaacggagaggtgattgggctgtacggcaatggcatccttgtcggtgacaactccttcgtgtccgccatatcccagactgaggtgaaggaagaaggaaaggaggagctccaagagatcccgacaatgctaaagaaaggaatgacaactgtccttgattttcatcctggagctgggaagacaagacgtttcctcccacagatcttggccgagtgcgcacggagacgcttgcgcactcttgtgttggcccccaccagggttgttctttctgaaatgaaggaggcttttcacggcctggacgtgaaattccacacacaggctttttccgctcacggcagcgggagagaagtcattgatgccatgtgccatgccaccctaacttacaggatgttggaaccaactagggttgttaactgggaagtgatcattatggatgaagcccattttttggatccagctagcatagccgctagaggttgggcagcgcacagagctagggcaaatgaaagtgcaacaatcttgatgacagccacaccgcctgggactagtgatgaatttccacattcaaatggtgaaatagaagatgttcaaacggacatacccagtgagccctggaacacagggcatgactggatcctggctgacaaaaggcccacggcatggttccttccatccatcagagctgcaaatgtcatggctgcctctttgcgtaaggctggaaagagtgtggtggtcctgaacaggaaaacctttgagagagaataccccacgataaagcagaagaaacctgactttatattggccactgacatagctgaaatgggagccaacctttgcgtggagcgagtgctggattgcaggacggcttttaagcctgtgcttgtggatgaagggaggaaggtggcaataaaagggccacttcgtatctccgcatcctctgctgctcaaaggagggggcgcattgggagaaatcccaacagagatggagactcatactactattctgagcctacaagtgaaaataatgcccaccacgtctgctggttggaggcctcaatgctcttggacaacatggaggtgaggggtggaatggtcgccccactctatggcgttgaaggaactaaaacaccagtttcccctggtgaaatgagactgagggatgaccagaggaaagtcttcagagaactagtgaggaattgtgacctgcccgtttggctttcgtggcaagtggccaaggctggtttgaagacgaatgatcgtaagtggtgttttgaaggccctgaggaacatgagatcttgaatgacagcggtgaaacagtgaagtgcagggctcctggaggagcaaagaagcctctgcgcccaaggtggtgtgatgaaagggtgtcatctgaccagagtgcgctgtctgaatttattaagtttgctgaaggtaggaggggagctgctgaagtgctagttgtgctgagtgaactccctgatttcctggctaaaaaaggtggagaggcaatggataccatcagtgtgttcctccactctgaggaaggctctagggcttaccgcaatgcactatcaatgatgcctgaggcaatgacaatagtcatgctgtttatactggctggactactgacatcgggaatggtcatctttttcatgtctcccaaaggcatcagtagaatgtctatggcgatgggcacaatggccggctgtggatatctcatgttccttggaggcgtcaaacccactcacatctcctatgtcatgctcatattctttgtcctgatggtggttgtgatccccgagccagggcaacaaaggtccatccaagacaaccaagtggcatacctcattattggcatcctgacgctggtttcagcggtggcagccaacgagctaggcatgctggagaaaaccaaagaggacctctttgggaagaagaacttaattccatctagtgcttcaccctggagttggccggatcttgacctgaagccaggagctgcctggacagtgtacgttggcattgttacaatgctctctccaatgttgcaccactggatcaaagtcgaatatggcaacctgtctctgtctggaatagcccagtcagcctcagtcctttctttcatggacaaggggataccattcatgaagatgaatatctcggtcataatgctgctggtcagtggctggaattcaataacagtgatgcctctgctctgtggcatagggtgcgccatgctccactggtctctcattttacctggaatcaaagcgcagcagtcaaagcttgcacagagaagggtgttccatggcgttgccaagaaccctgtggttgatgggaatccaacagttgacattgaggaagctcctgaaatgcctgccctttatgagaagaaactggctctatatctccttcttgctctcagcctagcttctgttgccatgtgcagaacgcccttttcattggctgaaggcattgtcctagcatcagctgccttagggccgctcatagagggaaacaccagccttctttggaatggacccatggctgtctccatgacaggagtcatgagggggaatcactatgcttttgtgggagtcatgtacaatctatggaagatgaaaactggacgccgggggagcgcgaatggaaaaactttgggtgaagtctggaagagggaactgaatctgttggacaagcgacagtttgagttgtataaaaggaccgacattgtggaggtggatcgtgatacggcacgcaggcatttggccgaagggaaggtggacaccggggtggcggtctccagggggaccgcaaagttaaggtggttccatgagcgtggctatgtcaagctggaaggtagggtgattgacctggggtgtggccgcggaggctggtgttactacgctgctgcgcaaaaggaagtgagtggggtcaaaggatttactcttggaagagacggccatgagaaacccatgaatgtgcaaagtctgggatggaacatcatcaccttcaaggacaaaactgatatccaccgcctagaaccagtgaaatgtgacacccttttgtgtgacattggagagtcatcatcgtcatcggtcacagagggggaaaggaccgtgagagttcttgatactgtagaaaaatggctggcttgtggggttgacaacttctgtgtgaaggtgttagctccatacatgccagatgttcttgagaaactggaattgctccaaaggaggtttggcggaacagtgatcaggaaccctctctccaggaattccactcatgaaatgtactacgtgtctggagcccgcagcaatgtcacatttactgtgaaccaaacatcccgcctcctgatgaggagaatgaggcgtccaactggaaaagtgaccctggaggctgacgtcatcctcccaattgggacacgcagtgttgagacagacaagggacccctggacaaagaggccatagaagaaagggttgagaggataaaatctgagtacatgacctcttggttttatgacaatgacaacccctacaggacctggcactactgtggctcctatgtcacaaaaacctcaggaagtgcggcgagcatggtaaatggtgttattaaaattctgacatatccatgggacaggatagaggaggtcacaagaatggcaatgactgacacaaccccttttggacagcaaagagtgtttaaagaaaaagttgacaccagagcaaaggatccaccagcgggaactaggaagatcatgaaagttgtcaacaggtggctgttccgccacctggccagagaaaagaaccccagactgtgcacaaaggaagaatttattgcaaaagtccgaagtcatgcagccattggagcttacctggaagaacaagaacagtggaagactgccaatgaggctgtccaagacccaaagttctgggaactggtggatgaagaaaggaagctgcaccaacaaggcaggtgtcggacttgtgtgtacaacatgatggggaaaagagagaagaagctgtcagagtttgggaaagcaaagggaagccgtgccatatggtatatgtggctgggagcgcggtatcttgagtttgaggccctgggattcctgaatgaggaccattgggcttccagggaaaactcaggaggaggagtggaaggcattggcttacaatacctaggatatgtgatcagagacctggctgcaatggatggtggtggattctacgcggatgacaccgctggatgggacacgcgcatcacagaggcagaccttgatgatgaacaggagatcttgaactacatgagcccacatcacaaaaaactggcacaagcagtgatggaaatgacatacaagaacaaagtggtgaaagtgttgagaccagccccaggagggaaagcctacatggatgtcataagtcgacgagaccagagaggatccgggcaggtagtgacttatgctctgaacaccatcaccaacttgaaagtccaattgatcagaatggcagaagcagagatggtgatacatcaccaacatgttcaagattgtgatgaatcagttctgaccaggctggaggcatggctcactgagcacggatgtgacagactgaagaggatggcggtgagtggagacgactgtgtggtccggcccatcgatgacaggttcggcctggccctgtcccatctcaacgccatgtccaaggttagaaaggacatatctgaatggcagccatcaaaagggtggaatgattgggagaatgtgcccttctgttcccaccacttccatgaactacagctgaaggatggcaggaggattgtggtgccttgccgagaacaggacgagctcattgggagaggaagggtgtctccaggaaacggctggatgatcaaggaaacagcttgcctcagcaaagcctatgccaacatgtggtcactgatgtattttcacaaaagggacatgaggctactgtcattggctgtttcctcagctgttcccacctcatgggttccacaaggacgcacaacatggtcgattcatgggaaaggggagtggatgaccacggaagacatgcttgaggtgtggaacagagtatggataaccaacaacccacacatgcaggacaagacaatggtgaaaaaatggagagatgtcccttatctaaccaagagacaagacaagctgtgcggatcactgattggaatgaccaatagggccacctgggcctcccacatccatttagtcatccatcgtatccgaacgctgattggacaggagaaatacactgactacctaacagtcatggacaggtattctgtggatgctgacctgcaactgggtgagcttatctgaaacaccatctaacaggaataaccgggatacaaaccacgggtggagaaccggactccccacaacctgaaaccgggatataaaccacggctggagaaccggactccgcacttaaaatgaaacagaaaccgggataaaaactacggatggagaaccggactccacacattgagacagaagaagttgtcagcccagaaccccacacgagttttgccactgctaagctgtgaggcagtgcaggctgggacagccgacctccaggttgcgaaaaacctggtttctgggacctcccaccccagagtaaaaagaacggagcctccgctaccaccctcccacgtggtggtagaaagacggggtctagaggttagaggagaccctccagggaacaaatagtgggaccatattgacgccagggaaagaccggagtggttctctgcttttcctccagaggtctgtgagcacagtttgctcaagaataagcagacctttggatgacaaacacaaaaccactcgag

SEQ ID NO: 103 - DNA, 9132 bp, Artificial Sequence
  Synthetic sequence
agtaaatcctgtgtgctaattgaggtgcattggtctgcaaatcgagttgctaggcaataaacacatttggattaattttaatcgttcgttgagcgattagcagagaactgaccagaacatgtctggtcgtaaagctcagggaaaaaccctgggcgtcaatatggtacgacgaggagttcgctccttgtcaaacaaaataaaacaaaaaacaaaacaaattggaaacagacctggaccttcaagaggtgttcaaggatttatctttttctttttgttcaacattttgactggaaaaaagatcacagcccacctaaagaggttgtggaaaatgctggacccaagacaaggcttggctgttctaaggaaagtcaagagagtggtggccagtttgatgagaggattgtcctcaaggaaacgccgttcccatgatgttctgactgtgcaattcctaattttgggaatgctgttgatgacgggtggagtgaccttggtgcggaaaaacagatggttgctcctaaatgtgacatctgaggacctcgggaaaacattctctgtgggcacaggcaactgcacaacaaacattttggaagccaagtactggtgcccagactcaatggaatacaactgtcccaatctcagtccaagagaggagccagatgacattgattgctggtgctatggggtggaaaacgttagagtcgcatatggagttggggcggatcaaggatgcgccatcaactttggcaagagagagctcaagtgcggagatggtatcttcatatttagagactctgatgactggctgaacaagtactcatactatccagaagatcctgtgaagcttgcatcaatagtgaaagcctcttttgaagaagggaagtgtggcctaaattcagttgactcccttgagcatgagatgtggagaagcagggcagatgagatcaatgccatttttgaggaaaacgaggtggacatttctgttgtcgtgcaggatccaaagaatgtttaccagagaggaactcatccattttccagaattcgggatggtctgcagtatggttggaagacttggggtaagaaccttgtgttctccccagggaggaagaatggaagcttcatcatagatggaaagtccaggaaagaatgcccgttttcaaaccgggtctggaattctttccagatagaggagtttgggacgggagtgttcaccacacgcgtgtacatggacgcagtctttgaatacaccatagactgcgatggatctatcttgggtgcagcggtgaacggaaaaaagagtgcccatggctctccaacattttggatgggaagtcatgaagtaaatgggacatggatgatccacaccttggaggcattagattacaaggagtgtgagtggccactgacacatacgattggaacatcagttgaagagagtgaaatgttcatgccgagatcaatcggaggcccagttagctctcacaatcatatccctggatacaaggttcagacgaacggaccttggatgcaggtaccactagaagtgaagagagaagcttgcccagggactagcgtgatcattgatggcaactgtgatggacggggaaaatcaaccagatccaccacggatagcgggaaagttattcctgaatggtgttgccgctcctgcacaatgccgcctgtgagcttccatggtagtgatgggtgttggtatcccatggaaattaggccaaggaaaacgcatgaaagccatctggtgcgctcctgggttacagctggagaaatacatgctgtcccttttggtttggtgagcatgatgatagcaatggaagtggtcctaaggaaaagacagggaccaaagcaaatgttggttggaggagtagtgctcttgggagcaatgctggtcgggcaagtaactctccttgatttgctgaaactcacagtggctgtgggattgcatttccatgagatgaacaatggaggagacgccatgtatatggcgttgattgctgccttttcaatcagaccagggctgctcatcggctttgggctcaggaccctatggagccctcgggaacgccttgtgctgaccctaggagcagccatggtggagattgccttgggtggcgtgatgggcggcctgtggaagtatctaaatgcagtttctctctgcatcctgacaataaatgctgttgcttctaggaaagcatcaaataccatcttgcccctcatggctctgttgacacctgtcactatggctgaggtgagacttgccgcaatgttcttttgtgccatggttatcataggggtccttcaccagaatttcaaggacacctccatgcagaagactatacctctggtggccctcacactcacatcttacctgggcttgacacaaccttttttgggcctgtgtgcatttctggcaacccgcatatttgggcgaaggagtatcccagtgaatgaggcactcgcagcagctggtctagtgggagtgctggcaggactggcttttcaggagatggagaacttccttggtccgattgcagttggaggactcctgatgatgctggttagcgtggctgggagggtggatgggctagagctcaagaagcttggtgaagtttcatgggaagaggaggcggagatcagcgggagttccgcccgctatgatgtggcactcagtgaacaaggggagttcaagctgctttctgaagagaaagtgccatgggaccaggttgtgatgacctcgctggccttggttggggctgccctccatccatttgctcttctgctggtccttgctgggtggctgtttcatgtcaggggagctaggagaagtggggatgtcttgtgggatattcccactcctaagatcatcgaggaatgtgaacatctggaggatgggatttatggcatattccagtcaaccttcttgggggcctcccagcgaggagtgggagtggcacagggaggggtgttccacacaatgtggcatgtcacaagaggagctttccttgtcaggaatggcaagaagttgattccatcttgggcttcagtaaaggaagaccttgtcgcctatggtggctcatggaagttggaaggcagatgggatggagaggaagaggtccagttgatcgcggctgttccaggaaagaacgtggtcaacgtccagacaaaaccgagcttgttcaaagtgaggaatgggggagaaatcggggctgtcgctcttgactatccgagtggcacttcaggatctcctattgttaacaggaacggagaggtgattgggctgtacggcaatggcatccttgtcggtgacaactccttcgtgtccgccatatcccagactgaggtgaaggaagaaggaaaggaggagctccaagagatcccgacaatgctaaagaaaggaatgacaactgtccttgattttcatcctggagctgggaagacaagacgtttcctcccacagatcttggccgagtgcgcacggagacgcttgcgcactcttgtgttggcccccaccagggttgttctttctgaaatgaaggaggcttttcacggcctggacgtgaaattccacacacaggctttttccgctcacggcagcgggagagaagtcattgatgccatgtgccatgccaccctaacttacaggatgttggaaccaactagggttgttaactgggaagtgatcattatggatgaagcccattttttggatccagctagcatagccgctagaggttgggcagcgcacagagctagggcaaatgaaagtgcaacaatcttgatgacagccacaccgcctgggactagtgatgaatttccacattcaaatggtgaaatagaagatgttcaaacggacatacccagtgagccctggaacacagggcatgactggatcctggctgacaaaaggcccacggcatggttccttccatccatcagagctgcaaatgtcatggctgcctctttgcgtaaggctggaaagagtgtggtggtcctgaacaggaaaacctttgagagagaataccccacgataaagcagaagaaacctgactttatattggccactgacatagctgaaatgggagccaacctttgcgtggagcgagtgctggattgcaggacggcttttaagcctgtgcttgtggatgaagggaggaaggtggcaataaaagggccacttcgtatctccgcatcctctgctgctcaaaggagggggcgcattgggagaaatcccaacagagatggagactcatactactattctgagcctacaagtgaaaataatgcccaccacgtctgctggttggaggcctcaatgctcttggacaacatggaggtgaggggtggaatggtcgccccactctatggcgttgaaggaactaaaacaccagtttcccctggtgaaatgagactgagggatgaccagaggaaagtcttcagagaactagtgaggaattgtgacctgcccgtttggctttcgtggcaagtggccaaggctggtttgaagacgaatgatcgtaagtggtgttttgaaggccctgaggaacatgagatcttgaatgacagcggtgaaacagtgaagtgcagggctcctggaggagcaaagaagcctctgcgcccaaggtggtgtgatgaaagggtgtcatctgaccagagtgcgctgtctgaatttattaagtttgctgaaggtaggaggggagctgctgaagtgctagttgtgctgagtgaactccctgatttcctggctaaaaaaggtggagaggcaatggataccatcagtgtgttcctccactctgaggaaggctctagggcttaccgcaatgcactatcaatgatgcctgaggcaatgacaatagtcatgctgtttatactggctggactactgacatcgggaatggtcatctttttcatgtctcccaaaggcatcagtagaatgtctatggcgatgggcacaatggccggctgtggatatctcatgttccttggaggcgtcaaacccactcacatctcctatgtcatgctcatattctttgtcctgatggtggttgtgatccccgagccagggcaacaaaggtccatccaagacaaccaagtggcatacctcattattggcatcctgacgctggtttcagcggtggcagccaacgagctaggcatgctggagaaaaccaaagaggacctctttgggaagaagaacttaattccatctagtgcttcaccctggagttggccggatcttgacctgaagccaggagctgcctggacagtgtacgttggcattgttacaatgctctctccaatgttgcaccactggatcaaagtcgaatatggcaacctgtctctgtctggaatagcccagtcagcctcagtcctttctttcatggacaaggggataccattcatgaagatgaatatctcggtcataatgctgctggtcagtggctggaattcaataacagtgatgcctctgctctgtggcatagggtgcgccatgctccactggtctctcattttacctggaatcaaagcgcagcagtcaaagcttgcacagagaagggtgttccatggcgttgccaagaaccctgtggttgatgggaatccaacagttgacattgaggaagctcctgaaatgcctgccctttatgagaagaaactggctctatatctccttcttgctctcagcctagcttctgttgccatgtgcagaacgcccttttcattggctgaaggcattgtcctagcatcagctgccttagggccgctcatagagggaaacaccagccttctttggaatggacccatggctgtctccatgacaggagtcatgagggggaatcactatgcttttgtgggagtcatgtacaatctatggaagatgaaaactggacgccgggggagcgcgaatggaaaaactttgggtgaagtctggaagagggaactgaatctgttggacaagcgacagtttgagttgtataaaaggaccgacattgtggaggtggatcgtgatacggcacgcaggcatttggccgaagggaaggtggacaccggggtggcggtctccagggggaccgcaaagttaaggtggttccatgagcgtggctatgtcaagctggaaggtagggtgattgacctggggtgtggccgcggaggctggtgttactacgctgctgcgcaaaaggaagtgagtggggtcaaaggatttactcttggaagagacggccatgagaaacccatgaatgtgcaaagtctgggatggaacatcatcaccttcaaggacaaaactgatatccaccgcctagaaccagtgaaatgtgacacccttttgtgtgacattggagagtcatcatcgtcatcggtcacagagggggaaaggaccgtgagagttcttgatactgtagaaaaatggctggcttgtggggttgacaacttctgtgtgaaggtgttagctccatacatgccagatgttcttgagaaactggaattgctccaaaggaggtttggcggaacagtgatcaggaaccctctctccaggaattccactcatgaaatgtactacgtgtctggagcccgcagcaatgtcacatttactgtgaaccaaacatcccgcctcctgatgaggagaatgaggcgtccaactggaaaagtgaccctggaggctgacgtcatcctcccaattgggacacgcagtgttgagacagacaagggacccctggacaaagaggccatagaagaaagggttgagaggataaaatctgagtacatgacctcttggttttatgacaatgacaacccctacaggacctggcactactgtggctcctatgtcacaaaaacctcaggaagtgcggcgagcatggtaaatggtgttattaaaattctgacatatccatgggacaggatagaggaggtcacaagaatggcaatgactgacacaaccccttttggacagcaaagagtgtttaaagaaaaagttgacaccagagcaaaggatccaccagcgggaactaggaagatcatgaaagttgtcaacaggtggctgttccgccacctggccagagaaaagaaccccagactgtgcacaaaggaagaatttattgcaaaagtccgaagtcatgcagccattggagcttacctggaagaacaagaacagtggaagactgccaatgaggctgtccaagacccaaagttctgggaactggtggatgaagaaaggaagctgcaccaacaaggcaggtgtcggacttgtgtgtacaacatgatggggaaaagagagaagaagctgtcagagtttgggaaagcaaagggaagccgtgccatatggtatatgtggctgggagcgcggtatcttgagtttgaggccctgggattcctgaatgaggaccattgggcttccagggaaaactcaggaggaggagtggaaggcattggcttacaatacctaggatatgtgatcagagacctggctgcaatggatggtggtggattctacgcggatgacaccgctggatgggacacgcgcatcacagaggcagaccttgatgatgaacaggagatcttgaactacatgagcccacatcacaaaaaactggcacaagcagtgatggaaatgacatacaagaacaaagtggtgaaagtgttgagaccagccccaggagggaaagcctacatggatgtcataagtcgacgagaccagagaggatccgggcaggtagtgacttatgctctgaacaccatcaccaacttgaaagtccaattgatcagaatggcagaagcagagatggtgatacatcaccaacatgttcaagattgtgatgaatcagttctgaccaggctggaggcatggctcactgagcacggatgtgacagactgaagaggatggcggtgagtggagacgactgtgtggtccggcccatcgatgacaggttcggcctggccctgtcccatctcaacgccatgtccaaggttagaaaggacatatctgaatggcagccatcaaaagggtggaatgattgggagaatgtgcccttctgttcccaccacttccatgaactacagctgaaggatggcaggaggattgtggtgccttgccgagaacaggacgagctcattgggagaggaagggtgtctccaggaaacggctggatgatcaaggaaacagcttgcctcagcaaagcctatgccaacatgtggtcactgatgtattttcacaaaagggacatgaggctactgtcattggctgtttcctcagctgttcccacctcatgggttccacaaggacgcacaacatggtcgattcatgggaaaggggagtggatgaccacggaagacatgcttgaggtgtggaacagagtatggataaccaacaacccacacatgcaggacaagacaatggtgaaaaaatggagagatgtcccttatctaaccaagagacaagacaagctgtgcggatcactgattggaatgaccaatagggccacctgggcctcccacatccatttagtcatccatcgtatccgaacgctgattggacaggagaaatacactgactacctaacagtcatggacaggtattctgtggatgctgacctgcaactgggtgagcttatctgaaacaccatctaacaggaataaccgggatacaaaccacgggtggagaaccggactccccacaacctgaaaccgggatataaaccacggctggagaaccggactccgcacttaaaatgaaacagaaaccgggataaaaactacggatggagaaccggactccacacattgagacagaagaagttgtcagcccagaaccccacacgagttttgccactgctaagctgtgaggcagtgcaggctgggacagccgacctccaggttgcgaaaaacctggtttctgggacctcccaccccagagtaaaaagaacggagcctccgctaccaccctcccacgtggtggtagaaagacggggtctagaggttagaggagaccctccagggaacaaatagtgggaccatattgacgccagggaaagaccggagtggttctctgcttttcctccagaggtctgtgagcacagtttgctcaagaataagcagacctttggatgacaaacacaaaaccactcgag

SEQ ID NO: 104 - DNA, 10770 bp, Artificial Sequence
  Synthetic sequence
agtaaatcctgtgtgctaattgaggtgcattggtctgcaaatcgagttgctaggcaataaacacatttggattaattttaatcgttcgttgagcgattagcagagaactgaccagaacatgtctggtcgtaaagctcagggaaaaaccctgggcgtcaatatggtacgacgaggagttcgctccttgtcaaacaaaataaaacaaaaaacaaaacaaattggaaacagacctggaccttcaagaggtgttcaaggatttatctttttctttttgttcaacattttgactggaaaaaagatcacagcccacctaaagaggttgtggaaaatgctggacccaagacaaggcttggctgttctaaggaaagtcaagagagtggtggccagtttgatgagaggattgtcctcaaggaaacgccgttcccatgatgttctgactgtgcaattcctaattttgggaatgctgttgatgacgggtggagtgaccttggtgcggaaaaacagatggttgctcctaaatgtgacatctgaggacctcgggaaaacattctctgtgggcacaggcaactgcacaacaaacattttggaagccaagtactggtgcccagactcaatggaatacaactgtcccaatctcagtccaagagaggagccagatgacattgattgctggtgctatggggtggaaaacgttagagtcgcatatggtaagtgtgactcagcaggcaggtctaggaggtcaagaagggccattgacttgcctacgcatgaaaaccatggtttgaagacccggcaagaaaaatggatgactggaagaatgggtgaaaggcaactccaaaagattgagagatggttcgtgaggaaccccttttttgcagtgacggctctgaccattgcctaccttgtgggaagcaacatgacgcaacgagtcgtgattgccctactggtcttggctgttggtccggcctactcagctcactgcattggaattactgacagggatttcattgagggggtgcatggaggaacttgggtttcagctaccctggagcaagacaagtgtgtcactgttatggcccctgacaagccttcattggacatctcactagagacagtagccattgatagacctgctgaggtgaggaaagtgtgttacaatgcagttctcactcatgtgaagattaatgacaagtgccccagcactggagaggcccacctagctgaagagaacgaaggggacaatgcgtgcaagcgcacttattctgatagaggctggggcaatggctgtggcctatttgggaaagggagcattgtggcatgcgccaaattcacttgtgccaaatccatgagtttgtttgaggttgatcagaccaaaattcagtatgtcatcagagcacaattgcatgtaggggccaagcaggaaaattggaataccgacattaagactctcaagtttgatgccctgtcaggctcccaggaaagctggatagtggacagacagtgggcccaggacttgaccctgccatggcagagtggaagtggcggggtgtggagagagatgcatcatcttgtcgaatttgaacctccgcatgccgccactatcagagtactggccctgggaaaccaggaaggctccttgaaaacagctcttactggcgcaatgagggttacaaaggacacaaatgacaacaacctttacaaactacatggtggacatgtttcttgcagagtgaaattgtcagctttgacactcaaggggacatcctacaaaatatgcactgacaaaatgttttttgtcaagaacccaactgacactggccatggcactgttgtgatgcaggtgaaagtgtcaaaaggagccccctgcaggattccagtgatagtagctgatgatcttacagcggcaatcaataaaggcattttggttacagttaaccccatcgcctcaaccaatgatgatgaagtgctgattgaggtgaacccaccttttggagacagctacattatcgttgggagaggagattcacgtctcacttaccagtggcacaaagagggaagctcaataggaaagttgttcactcagaccatgaaaggcgtggaacgcctggccgtcatgggagacaccgcctgggatttcagctccgctggagggttcttcacttcggttgggaaaggaattcatacggtgtttggctctgcctttcaggggctatttggcggcttgaactggataacaaaggtcatcatgggggcggtacttatatgggttggcatcaacacaagaaacatgacaatgtccatgagcatgatcttggtaggagtgatcatgatgtttttgtctctaggagttggggcggatcaaggatgcgccatcaactttggcaagagagagctcaagtgcggagatggtatcttcatatttagagactctgatgactggctgaacaagtactcatactatccagaagatcctgtgaagcttgcatcaatagtgaaagcctcttttgaagaagggaagtgtggcctaaattcagttgactcccttgagcatgagatgtggagaagcagggcagatgagatcaatgccatttttgaggaaaacgaggtggacatttctgttgtcgtgcaggatccaaagaatgtttaccagagaggaactcatccattttccagaattcgggatggtctgcagtatggttggaagacttggggtaagaaccttgtgttctccccagggaggaagaatggaagcttcatcatagatggaaagtccaggaaagaatgcccgttttcaaaccgggtctggaattctttccagatagaggagtttgggacgggagtgttcaccacacgcgtgtacatggacgcagtctttgaatacaccatagactgcgatggatctatcttgggtgcagcggtgaacggaaaaaagagtgcccatggctctccaacattttggatgggaagtcatgaagtaaatgggacatggatgatccacaccttggaggcattagattacaaggagtgtgagtggccactgacacatacgattggaacatcagttgaagagagtgaaatgttcatgccgagatcaatcggaggcccagttagctctcacaatcatatccctggatacaaggttcagacgaacggaccttggatgcaggtaccactagaagtgaagagagaagcttgcccagggactagcgtgatcattgatggcaactgtgatggacggggaaaatcaaccagatccaccacggatagcgggaaagttattcctgaatggtgttgccgctcctgcacaatgccgcctgtgagcttccatggtagtgatgggtgttggtatcccatggaaattaggccaaggaaaacgcatgaaagccatctggtgcgctcctgggttacagctggagaaatacatgctgtcccttttggtttggtgagcatgatgatagcaatggaagtggtcctaaggaaaagacagggaccaaagcaaatgttggttggaggagtagtgctcttgggagcaatgctggtcgggcaagtaactctccttgatttgctgaaactcacagtggctgtgggattgcatttccatgagatgaacaatggaggagacgccatgtatatggcgttgattgctgccttttcaatcagaccagggctgctcatcggctttgggctcaggaccctatggagccctcgggaacgccttgtgctgaccctaggagcagccatggtggagattgccttgggtggcgtgatgggcggcctgtggaagtatctaaatgcagtttctctctgcatcctgacaataaatgctgttgcttctaggaaagcatcaaataccatcttgcccctcatggctctgttgacacctgtcactatggctgaggtgagacttgccgcaatgttcttttgtgccatggttatcataggggtccttcaccagaatttcaaggacacctccatgcagaagactatacctctggtggccctcacactcacatcttacctgggcttgacacaaccttttttgggcctgtgtgcatttctggcaacccgcatatttgggcgaaggagtatcccagtgaatgaggcactcgcagcagctggtctagtgggagtgctggcaggactggcttttcaggagatggagaacttccttggtccgattgcagttggaggactcctgatgatgctggttagcgtggctgggagggtggatgggctagagctcaagaagcttggtgaagtttcatgggaagaggaggcggagatcagcgggagttccgcccgctatgatgtggcactcagtgaacaaggggagttcaagctgctttctgaagagaaagtgccatgggaccaggttgtgatgacctcgctggccttggttggggctgccctccatccatttgctcttctgctggtccttgctgggtggctgtttcatgtcaggggagctaggagaagtggggatgtcttgtgggatattcccactcctaagatcatcgaggaatgtgaacatctggaggatgggatttatggcatattccagtcaaccttcttgggggcctcccagcgaggagtgggagtggcacagggaggggtgttccacacaatgtggcatgtcacaagaggagctttccttgtcaggaatggcaagaagttgattccatcttgggcttcagtaaaggaagaccttgtcgcctatggtggctcatggaagttggaaggcagatgggatggagaggaagaggtccagttgatcgcggctgttccaggaaagaacgtggtcaacgtccagacaaaaccgagcttgttcaaagtgaggaatgggggagaaatcggggctgtcgctcttgactatccgagtggcacttcaggatctcctattgttaacaggaacggagaggtgattgggctgtacggcaatggcatccttgtcggtgacaactccttcgtgtccgccatatcccagactgaggtgaaggaagaaggaaaggaggagctccaagagatcccgacaatgctaaagaaaggaatgacaactgtccttgattttcatcctggagctgggaagacaagacgtttcctcccacagatcttggccgagtgcgcacggagacgcttgcgcactcttgtgttggcccccaccagggttgttctttctgaaatgaaggaggcttttcacggcctggacgtgaaattccacacacaggctttttccgctcacggcagcgggagagaagtcattgatgccatgtgccatgccaccctaacttacaggatgttggaaccaactagggttgttaactgggaagtgatcattatggatgaagcccattttttggatccagctagcatagccgctagaggttgggcagcgcacagagctagggcaaatgaaagtgcaacaatcttgatgacagccacaccgcctgggactagtgatgaatttccacattcaaatggtgaaatagaagatgttcaaacggacatacccagtgagccctggaacacagggcatgactggatcctggctgacaaaaggcccacggcatggttccttccatccatcagagctgcaaatgtcatggctgcctctttgcgtaaggctggaaagagtgtggtggtcctgaacaggaaaacctttgagagagaataccccacgataaagcagaagaaacctgactttatattggccactgacatagctgaaatgggagccaacctttgcgtggagcgagtgctggattgcaggacggcttttaagcctgtgcttgtggatgaagggaggaaggtggcaataaaagggccacttcgtatctccgcatcctctgctgctcaaaggagggggcgcattgggagaaatcccaacagagatggagactcatactactattctgagcctacaagtgaaaataatgcccaccacgtctgctggttggaggcctcaatgctcttggacaacatggaggtgaggggtggaatggtcgccccactctatggcgttgaaggaactaaaacaccagtttcccctggtgaaatgagactgagggatgaccagaggaaagtcttcagagaactagtgaggaattgtgacctgcccgtttggctttcgtggcaagtggccaaggctggtttgaagacgaatgatcgtaagtggtgttttgaaggccctgaggaacatgagatcttgaatgacagcggtgaaacagtgaagtgcagggctcctggaggagcaaagaagcctctgcgcccaaggtggtgtgatgaaagggtgtcatctgaccagagtgcgctgtctgaatttattaagtttgctgaaggtaggaggggagctgctgaagtgctagttgtgctgagtgaactccctgatttcctggctaaaaaaggtggagaggcaatggataccatcagtgtgttcctccactctgaggaaggctctagggcttaccgcaatgcactatcaatgatgcctgaggcaatgacaatagtcatgctgtttatactggctggactactgacatcgggaatggtcatctttttcatgtctcccaaaggcatcagtagaatgtctatggcgatgggcacaatggccggctgtggatatctcatgttccttggaggcgtcaaacccactcacatctcctatgtcatgctcatattctttgtcctgatggtggttgtgatccccgagccagggcaacaaaggtccatccaagacaaccaagtggcatacctcattattggcatcctgacgctggtttcagcggtggcagccaacgagctaggcatgctggagaaaaccaaagaggacctctttgggaagaagaacttaattccatctagtgcttcaccctggagttggccggatcttgacctgaagccaggagctgcctggacagtgtacgttggcattgttacaatgctctctccaatgttgcaccactggatcaaagtcgaatatggcaacctgtctctgtctggaatagcccagtcagcctcagtcctttctttcatggacaaggggataccattcatgaagatgaatatctcggtcataatgctgctggtcagtggctggaattcaataacagtgatgcctctgctctgtggcatagggtgcgccatgctccactggtctctcattttacctggaatcaaagcgcagcagtcaaagcttgcacagagaagggtgttccatggcgttgccaagaaccctgtggttgatgggaatccaacagttgacattgaggaagctcctgaaatgcctgccctttatgagaagaaactggctctatatctccttcttgctctcagcctagcttctgttgccatgtgcagaacgcccttttcattggctgaaggcattgtcctagcatcagctgccttagggccgctcatagagggaaacaccagccttctttggaatggacccatggctgtctccatgacaggagtcatgagggggaatcactatgcttttgtgggagtcatgtacaatctatggaagatgaaaactggacgccgggggagcgcgaatggaaaaactttgggtgaagtctggaagagggaactgaatctgttggacaagcgacagtttgagttgtataaaaggaccgacattgtggaggtggatcgtgatacggcacgcaggcatttggccgaagggaaggtggacaccggggtggcggtctccagggggaccgcaaagttaaggtggttccatgagcgtggctatgtcaagctggaaggtagggtgattgacctggggtgtggccgcggaggctggtgttactacgctgctgcgcaaaaggaagtgagtggggtcaaaggatttactcttggaagagacggccatgagaaacccatgaatgtgcaaagtctgggatggaacatcatcaccttcaaggacaaaactgatatccaccgcctagaaccagtgaaatgtgacacccttttgtgtgacattggagagtcatcatcgtcatcggtcacagagggggaaaggaccgtgagagttcttgatactgtagaaaaatggctggcttgtggggttgacaacttctgtgtgaaggtgttagctccatacatgccagatgttcttgagaaactggaattgctccaaaggaggtttggcggaacagtgatcaggaaccctctctccaggaattccactcatgaaatgtactacgtgtctggagcccgcagcaatgtcacatttactgtgaaccaaacatcccgcctcctgatgaggagaatgaggcgtccaactggaaaagtgaccctggaggctgacgtcatcctcccaattgggacacgcagtgttgagacagacaagggacccctggacaaagaggccatagaagaaagggttgagaggataaaatctgagtacatgacctcttggttttatgacaatgacaacccctacaggacctggcactactgtggctcctatgtcacaaaaacctcaggaagtgcggcgagcatggtaaatggtgttattaaaattctgacatatccatgggacaggatagaggaggtcacaagaatggcaatgactgacacaaccccttttggacagcaaagagtgtttaaagaaaaagttgacaccagagcaaaggatccaccagcgggaactaggaagatcatgaaagttgtcaacaggtggctgttccgccacctggccagagaaaagaaccccagactgtgcacaaaggaagaatttattgcaaaagtccgaagtcatgcagccattggagcttacctggaagaacaagaacagtggaagactgccaatgaggctgtccaagacccaaagttctgggaactggtggatgaagaaaggaagctgcaccaacaaggcaggtgtcggacttgtgtgtacaacatgatggggaaaagagagaagaagctgtcagagtttgggaaagcaaagggaagccgtgccatatggtatatgtggctgggagcgcggtatcttgagtttgaggccctgggattcctgaatgaggaccattgggcttccagggaaaactcaggaggaggagtggaaggcattggcttacaatacctaggatatgtgatcagagacctggctgcaatggatggtggtggattctacgcggatgacaccgctggatgggacacgcgcatcacagaggcagaccttgatgatgaacaggagatcttgaactacatgagcccacatcacaaaaaactggcacaagcagtgatggaaatgacatacaagaacaaagtggtgaaagtgttgagaccagccccaggagggaaagcctacatggatgtcataagtcgacgagaccagagaggatccgggcaggtagtgacttatgctctgaacaccatcaccaacttgaaagtccaattgatcagaatggcagaagcagagatggtgatacatcaccaacatgttcaagattgtgatgaatcagttctgaccaggctggaggcatggctcactgagcacggatgtgacagactgaagaggatggcggtgagtggagacgactgtgtggtccggcccatcgatgacaggttcggcctggccctgtcccatctcaacgccatgtccaaggttagaaaggacatatctgaatggcagccatcaaaagggtggaatgattgggagaatgtgcccttctgttcccaccacttccatgaactacagctgaaggatggcaggaggattgtggtgccttgccgagaacaggacgagctcattgggagaggaagggtgtctccaggaaacggctggatgatcaaggaaacagcttgcctcagcaaagcctatgccaacatgtggtcactgatgtattttcacaaaagggacatgaggctactgtcattggctgtttcctcagctgttcccacctcatgggttccacaaggacgcacaacatggtcgattcatgggaaaggggagtggatgaccacggaagacatgcttgaggtgtggaacagagtatggataaccaacaacccacacatgcaggacaagacaatggtgaaaaaatggagagatgtcccttatctaaccaagagacaagacaagctgtgcggatcactgattggaatgaccaatagggccacctgggcctcccacatccatttagtcatccatcgtatccgaacgctgattggacaggagaaatacactgactacctaacagtcatggacaggtattctgtggatgctgacctgcaactgggtgagcttatctgaaacaccatctaacaggaataaccgggatacaaaccacgggtggagaaccggactccccacaacctgaaaccgggatataaaccacggctggagaaccggactccgcacttaaaatgaaacagaaaccgggataaaaactacggatggagaaccggactccacacattgagacagaagaagttgtcagcccagaaccccacacgagttttgccactgctaagctgtgaggcagtgcaggctgggacagccgacctccaggttgcgaaaaacctggtttctgggacctcccaccccagagtaaaaagaacggagcctccgctaccaccctcccacgtggtggtagaaagacggggtctagaggttagaggagaccctccagggaacaaatagtgggaccatattgacgccagggaaagaccggagtggttctctgcttttcctccagaggtctgtgagcacagtttgctcaagaataagcagacctttggatgacaaacacaaaaccactcgag

SEQ ID NO: 105 - DNA, 10948 bp, Artificial Sequence
  Synthetic sequence
agtagttcgcctgtgtgagctgacaaacttagtagtgtttgtgaggattaacaacaattaacacagtgcgagctgtttcttagcacgaagatctcgatgtctaagaaaccaggagggcccggcaagagccgggctgtcaatatgctaaaacgcggaatgccccgcgtgttgtccttgattggactgaagagggctatgttgagcctgatcgacggcaaggggccaatacgatttgtgttggctctcttggcgttcttcaggttcacagcaattgctccgacccgagcagtgctggatcgatggagaggtgtgaataaacaaacagcgatgaaacaccttctgagttttaagaaggaactagggaccttgaccagtgctatcaatcggcggagctcaaaacaaaagaaaagaggaggaaagaccggaattgcagtcatgattggcctgatcgccagcgtaggagcagttaccctctctaacttccaagggaaggtgatgatgacggtaaatgctactgacgtcacagatgtcatcacgattccaacagctgctggaaagaacctatgcattgtcagagcaatggatgtgggatacatgtgcgatgatactatcacttatgaatgcccagtgctgtcggctggtaatgatccagaagacatcgactgttggtgcacaaagtcagcagtctacgtcaggtatggaagatgcaccaagacacgccactcaagacgcagtcggaggtcactgacagtgcagacacacggagaaagcactctagcgaacaagaagggggcttggatggacagcaccaaggccacaaggtatttggtaaaaacagaatcatggatcttgaggaaccctggatatgccctggtggcagccgtcattggttggatgcttgggagcaacaccatgcagagagttgtgtttgtcgtgctattgcttttggtggccccagcttacagctttaactgccttggaatgagcaacagagacttcttggaaggagtgtctggagcaacatgggtggatttggttctcgaaggcgacagctgcgtgactatcatgtctaaggacaagcctaccatcgatgtgaagatgatgaatatggaggcggccaacctggcagaggtccgcagttattgctatttggctaccgtcagcgatctctccaccaaagctgcgtgcccgaccatgggagaagctcacaatgacaaacgtgctgacccagcttttgtgtgcagacaaggagtggtggacaggggctggggcaacggctgcggactatttggcaaaggaagcattgacacatgcgccaaatttgcctgctctaccaaggcaataggaagaaccatcttgaaagagaatatcaagtacgaagtggccatttttgtccatggaccaactactgtggagtcgcacggaaactactccacacaggttggagccactcaggcagggagattcagcatcactcctgcggcgccttcatacacactaaagcttggagaatatggagaggtgacagtggactgtgaaccacggtcagggattgacaccaatgcatactacgtgatgactgttgggaacagagagacgttaatggagtttgaggaaccacacgccacgaagcagtctgtgatagcattgggctcacaagagggagctctgcatcaagctttggctggagccattcctgtggaattttcaagcaacactgtcaagttgacgtcgggtcatttgaagtgtagagtgaagatggaaaaattgcagttgaagggaacaacctatggcgtctgttcaaaggctttcaagtttcttgggactcccgcagacacaggtcacggcactgtggtgttggaattgcagtacactggcacggatggaccttgcaaagttcctatctcgtcagtggcttcattgaacgacctaacgccagtgggcagattggtcactgtcaacccttttgtttcagtggccacggccaacgctaaggtcctgattgaattggaaccaccctttggagactcatacatagtggtgggcagaggagaacaacagattaatcaccattggcacaagtctggaagcagcattggcaaagcctttacaaccaccctcaaaggagcgcagagactagccgctctaggagacacagcttgggactttggatcagttggaggggtgttcacctcagttgggaaggctgtccatcaagtgttcggaggagcattccgctcactgttcggaggcatgtcctggataacgcaaggattgctgggggctctcctgttgtggatgggcatcaatgctcgtgataggtccatagctctcacgtttctcgcagttggaggagttctgctcttcctctccgtgaacgtgcacgctgacactgggtgtgccatagacatcagccggcaagagctgagatgtggaagtggagtgttcatacacaatgatgtggaggcttggatggaccggtacaagtattaccctgaaacgccacaaggcctagccaagatcattcagaaagctcataaggaaggagtgtgcggtctacgatcagtttccagactggagcatcaaatgtgggaagcagtgaaggacgagctgaacactcttttgaaggagaatggtgtggaccttagtgtcgtggttgagaaacaggagggaatgtacaagtcagcacctaaacgcctcaccgccaccacggaaaaactggaaattggctggaaggcctggggaaagagtattttatttgcaccagaactcgccaacaacacctttgtggttgatggtccggagaccaaggaatgtccgactcagaatcgcgcttggaatagcttagaagtggaggattttggatttggtctcaccagcactcggatgttcctgaaggtcagagagagcaacacaactgaatgtgactcgaagatcattggaacggctgtcaagaacaacttggcgatccacagtgacctgtcctattggattgaaagcaggctcaatgatacgtggaagcttgaaagggcagttctgggtgaagtcaaatcatgtacgtggcctgagacgcataccttgtggggcgatggaatccttgagagtgacttgataataccagtcacactggcgggaccacgaagcaatcacaatcggagacctgggtacaagacacaaaaccagggcccatgggacgaaggccgggtagagattgacttcgattactgcccaggaactacggtcaccctgagtgagagctgcggacaccgtggacctgccactcgcaccaccacagagagcggaaagttgataacagattggtgctgcaggagctgcaccttaccaccactgcgctaccaaactgacagcggctgttggtatggtatggagatcagaccacagagacatgatgaaaagaccctcgtgcagtcacaagtgaatgcttataatgctgatatgattgacccttttcagttgggccttctggtcgtgttcttggccacccaggaggtccttcgcaagaggtggacagccaagatcagcatgccagctatactgattgctctgctagtcctggtgtttgggggcattacttacactgatgtgttacgctatgtcatcttggtgggggcagctttcgcagaatctaattcgggaggagacgtggtacacttggcgctcatggcgaccttcaagatacaaccagtgtttatggtggcatcgtttctcaaagcgagatggaccaaccaggagaacattttgttgatgttggcggctgttttctttcaaatggcttatcacgatgcccgccaaattctgctctgggagatccctgatgtgttgaattcactggcggtagcttggatgatactgagagccataacattcacaacgacatcaaacgtggttgttccgctgctagccctgctaacacccgggctgagatgcttgaatctggatgtgtacaggatactgctgttgatggtcggaataggcagcttgatcagggagaagaggagtgcagctgcaaaaaagaaaggagcaagtctgctatgcttggctctagcctcaacaggacttttcaaccccatgatccttgctgctggactgattgcatgtgatcccaaccgtaaacgcggatggcccgcaactgaagtgatgacagctgtcggcctaatgtttgccatcgtcggagggctggcagagcttgacattgactccatggccattccaatgactatcgcggggctcatgtttgctgctttcgtgatttctgggaaatcaacagatatgtggattgagagaacggcggacatttcctgggaaagtgatgcagaaattacaggctcgagcgaaagagttgatgtgcggcttgatgatgatggaaacttccagctcatgaatgatccaggagcaccttggaagatatggatgctcagaatggtctgtctcgcgattagtgcgtacaccccctgggcaatcttgccctcagtagttggattttggataactctccaatacacaaagagaggaggtgtgttgtgggacactccctcaccaaaggagtacaaaaagggggacacgaccaccggcgtctacaggatcatgactcgtgggctgctcggcagttatcaagcaggagcgggcgtgatggttgaaggtgttttccacaccctttggcatacaacaaaaggagccgctttgatgagcggagagggccgcctggacccatactggggcagtgtcaaggaggatcgactttgttacggaggaccctggaaattgcagcacaagtggaacgggcaggatgaggtgcagatgattgtggtggaacctggcaagaacgttaagaacgtccagacgaaaccaggggtgttcaaaacacctgaaggagaaatcggggccgtgactttggacttccccactggaacatcaggctcaccaatagtggacaaaaacggtgatgtgattgggctttatggcaatggagtcataatgcccaacggctcatacataagcgcgatagtgcagggtgaaaggatggatgagccaatcccagccggattcgaacctgagatgctgaggaaaaaacagatcactgtactggatctccatcccggcgccggtaaaacaaggaggattctgccacagatcatcaaagaggccataaacagaagactgagaacagccgtgctagcaccaaccagggttgtggctgctgagatggctgaagcactgagaggactgcccatccggtaccagacatccgcagtgcccagagaacataatggaaatgagattgttgatgtcatgtgtcatgctaccctcacccacaggctgatgtctcctcacagggtgccgaactacaacctgttcgtgatggatgaggctcatttcaccgacccagctagtatcgcagcaagaggttacatttccacaaaggtcgagctaggggaggcggcggcaatattcatgacagccaccccaccaggcacttcagatccattcccagagtccaattcaccaatttccgacttacagactgagatcccggatcgagcttggaactctggatacgaatggatcacagaatacaccgggaagacggtttggtttgtgcctagtgtcaagatggggaatgagattgccctttgcctacaacgtgctggaaagaaagtagtccaattgaacagaaagtcgtacgagacggagtacccaaaatgtaagaacgatgattgggactttgttatcacaacagacatatctgaaatgggggctaacttcaaggcgagcagggtgattgacagccggaagagtgtgaaaccaaccatcataacagaaggagaagggagagtgatcctgggagaaccatctgcagtgacagcagctagtgccgcccagagacgtggacgtatcggtagaaatccgtcgcaagttggtgatgagtactgttatggggggcacacgaatgaagacgactcgaacttcgcccattggactgaggcacgaatcatgctggacaacatcaacatgccaaacggactgatcgctcaattctaccaaccagagcgtgagaaggtatataccatggatggggaataccggctcagaggagaagagaggaaaaactttctggaactgttgaggactgcagatctgccagtttggctggcttacaaggttgcagcggctggagtgtcataccacgaccggaggtggtgctttgatggtcctaggacaaacacaattttagaagacaacaacgaagtggaagtcatcacgaagcttggtgaaaggaagattctgaggccgcgctggattgacgccagggtgtactcggatcaccaggcactaaaggcgttcaaggacttcgcctcgggaaaacgttctcagatagggctcattgaggttctgggaaagatgcctgagcacttcatggggaagacatgggaagcacttgacaccatgtacgtagtggccactgcagagaaaggaggaagagctcacagaatggccctggaggaactgccagatgctcttcagacaattgccttgattgccttattgagtgtgatgaccatgggagtattcttcctcctcatgcagcggaagggcattggaaagataggtttgggaggcgctgtcttgggagtcgcgacctttttctgttggatggctgaagttccaggaacgaagatcgccggaatgttgctgctctcccttctcttgatgattgtgctaattcctgagccagagaagcaacgttcgcagacagacaaccagctagccgtgttcctgatttgtgtcatgacccttgtgagcgcagtggcagccaacgagatgggttggctagataagaccaagagtgacataagcagtttgtttgggcaaagaattgaggtcaaggagaatttcagcatgggagagtttcttctggacttgaggccggcaacagcctggtcactgtacgctgtgacaacagcggtcctcactccactgctaaagcatttgatcacgtcagattacatcaacacctcattgacctcaataaacgttcaggcaagtgcactattcacactcgcgcgaggcttccccttcgtcgatgttggagtgtcggctctcctgctagcagccggatgctggggacaagtcaccctcaccgttacggtaacagcggcaacactccttttttgccactatgcctacatggttcccggttggcaagctgaggcaatgcgctcagcccagcggcggacagcggccggaatcatgaagaacgctgtagtggatggcatcgtggccacggacgtcccagaattagagcgcaccacacccatcatgcagaagaaagttggacagatcatgctgatcttggtgtctctagctgcagtagtagtgaacccgtctgtgaagacagtacgagaagccggaattttgatcacggccgcagcggtgacgctttgggagaatggagcaagctctgtttggaacgcaacaactgccatcggactctgccacatcatgcgtgggggttggttgtcatgtctatccataacatggacactcataaagaacatggaaaaaccaggactaaaaagaggtggggcaaaaggacgcaccttgggagaggtttggaaagaaagactcaaccagatgacaaaagaagagttcactaggtaccgcaaagaggccatcatcgaagtcgatcgctcagcggcaaaacacgccaggaaagaaggcaatgtcactggagggcattcagtctctaggggcacagcaaaactgagatggctggtcgaacggaggtttctcgaaccggtcggaaaagtgattgaccttggatgtggaagaggcggttggtgttactatatggcaacccaaaaaagagtccaagaagtcagagggtacacaaagggcggtcccggacatgaagagccccaactagtgcaaagttatggatggaacattgtcaccatgaagagtggagtggatgtgttctacagaccttctgagtgttgtgacaccctcctttgtgacatcggagagtcctcgtcaagtgctgaggttgaagagcataggacgattcgtgtccttgaaatggttgaggactggctgcaccgagggccaagggaattttgcgtgaaggtgctctgcccctacatgccgaaagtcatagagaagatggagctgctccaacgccggtatggggggggactggtcagaaacccactctcacggaattccacgcacgagatgtattgggtgagtcgagcttcaggcaatgtggtacattcagtgaatatgaccagccaggtgctcctaggaagaatggaaaaaaggacctggaagggaccccaatacgaggaagatgtaaacttgggaagtggaaccagggcggtgggaaaacccctgctcaactcagacaccagtaaaatcaagaacaggattgaacgactcaggcgtgagtacagttcgacgtggcaccacgatgagaaccacccatatagaacctggaactatcacggcagttatgatgtgaagcccacaggctccgccagttcgctggtcaatggagtggtcaggctcctctcaaaaccatgggacaccatcacgaatgttaccaccatggccatgactgacactactcccttcgggcagcagcgagtgttcaaagagaaggtggacacgaaagctcctgaaccgccagaaggagcgaagtacgtgctcaacgagaccaccaactggttgtgggcgtttttggccagagaaaaacgtcccagaatgtgctctcgagaggaattcataagaaaggtcaacagcaatgcagctttgggtgccatgtttgaagagcagaatcaatggaggagcgccagagaagcagttgaagatccaaaattttgggagatggtggatgaggagcgcgaggcacatctgcggggggaatgtcacacttgcatttacaacatgatgggaaagagagagaaaaaacccggagagttcggaaaggccaagggaagcagagccatttggttcatgtggctcggagctcgctttctggagttcgaggctctgggttttctcaatgaagaccactggcttggaagaaagaactcaggaggaggtgtcgagggcttgggcctccaaaaactgggttacatcctgcgtgaagttggcacccggcctgggggcaagatctatgctgatgacacagctggctgggacacccgcatcacgagagctgacttggaaaatgaagctaaggtgcttgagctgcttgatggggaacatcggcgtcttgccagggccatcattgagctcacctatcgtcacaaagttgtgaaagtgatgcgcccggctgctgatggaagaaccgtcatggatgttatctccagagaagatcagagggggagtggacaagttgtcacctacgccctaaacactttcaccaacctggccgtccagctggtgaggatgatggaaggggaaggagtgattggcccagatgatgtggagaaactcacaaaagggaaaggacccaaagtcaggacctggctgtttgagaatggggaagaaagactcagccgcatggctgtcagtggagatgactgtgtggtaaagcccctggacgatcgctttgccacctcgctccacttcctcaatgctatgtcaaaggttcgcaaagacatccaagagtggaaaccgtcaactggatggtatgattggcagcaggttccattttgctcaaaccatttcactgaattgatcatgaaagatggaagaacactggtggttccatgccgaggacaggatgaattggtaggcagagctcgcatatctccaggggccggatggaacgtccgcgacactgcttgtctggctaagtcttatgcccagatgtggctgcttctgtacttccacagaagagacctgcggctcatggccaacgccatttgctccgctgtccctgtgaattgggtccctaccggaagaaccacgtggtccatccatgcaggaggagagtggatgacaacagaggacatgttggaggtctggaaccgtgtttggatagaggagaatgaatggatggaagacaaaaccccagtggagaaatggagtgacgtcccatattcaggaaaacgagaggacatctggtgtggcagcctgattggcacaagagcccgagccacgtgggcagaaaacatccaggtggctatcaaccaagtcagagcaatcatcggagatgagaagtatgtggattacatgagttcactaaagagatatgaagacacaactttggttgaggacacagtactgtagatatttaatcaattgtaaatagacaatataagtatgcataaaagtgtagttttatagtagtatttagtggtgttagtgtaaatagttaagaaaattttgaggagaaagtcaggccgggaagttcccgccaccggaagttgagtagacggtgctgcctgcgactcaaccccaggaggactgggtgaacaaagccgcgaagtgatccatgtaagccctcagaaccgtctcggaaggaggaccccacatgttgtaacttcaaagcccaatgtcagaccacgctacggcgtgctactctgcggagagtgcagtctgcgatagtgccccaggaggactgggttaacaaaggcaaatcaacgccccacgcggccctagccccggtaatggtgttaaccagggcgaaaggactagaggttagaggagaccccgcggtttaaagtgcacggcccagcctggctgaagctgtaggtcaggggaaggactagaggttagtggagaccccgtgccacaaaacaccacaacaaaacagcatattgacacctgggatagactaggagatcttctgctctgcacaaccagccacacggcacagtgcgccgacaatggtggctggtggtgcgagaacacaggatct

SEQ ID NO: 106 - DNA, 10794 bp, Artificial Sequence
  Synthetic sequence
agtagttcgcctgtgtgagctgacaaacttagtagtgtttgtgaggattaacaacaattaacacagtgcgagctgtttcttagcacgaagatctcgatgtctaagaaaccaggagggcccggcaagagccgggctgtcaatatgctaaaacgcggaatgccccgcgtgttgtccttgattggactgaagagggctatgttgagcctgatcgacggcaaggggccaatacgatttgtgttggctctcttggcgttcttcaggttcacagcaattgctccgacccgagcagtgctggatcgatggagaggtgtgaataaacaaacagcgatgaaacaccttctgagttttaagaaggaactagggaccttgaccagtgctatcaatcggcggagctcaaaacaaaagaaaagaggaggaaagaccggaattgcagtcatgattggcctgatcgccagcgtaggagcagttaccctctctaacttccaagggaaggtgatgatgacggtaaatgctactgacgtcacagatgtcatcacgattccaacagctgctggaaagaacctatgcattgtcagagcaatggatgtgggatacatgtgcgatgatactatcacttatgaatgcccagtgctgtcggctggtaatgatccagaagacatcgactgttggtgcacaaagtcagcagtctacgtcaggtatggaagatgcaccaagacacgccactcaagacgcagtcggaggtcactgacagtgcagacacacggagaaagcactctagcgaacaagaagggggcttggatggacagcaccaaggccacaaggtatttggtaaaaacagaatcatggatcttgaggaaccctggatatgccctggtggcagccgtcattggttggatgcttgggagcaacaccatgcagagagttgtgtttgtcgtgctattgcttttggtggccccagcttacagctttaactgccttggaatgagcaacagagacttcttggaaggagtgtctggagcaacatgggtggatttggttctcgaaggcgacagctgcgtgactatcatgtctaaggacaagcctaccatcgatgtgaagatgatgaatatggaggcggccaacctggcagaggtccgcagttattgctatttggctaccgtcagcgatctctccaccaaagctgcgtgcccgaccatgggagaagctcacaatgacaaacgtgctgacccagcttttgtgtgcagacaaggagtggtggacaggggctggggcaacggctgcggactatttggcaaaggaagcattgacacatgcgccaaatttgcctgctctaccaaggcaataggaagaaccatcttgaaagagaatatcaagtacgaagtggccatttttgtccatggaccaactactgtggagtcgcacggaaactactccacacaggttggagccactcaggcagggagattcagcatcactcctgcggcgccttcatacacactaaagcttggagaatatggagaggtgacagtggactgtgaaccacggtcagggattgacaccaatgcatactacgtgatgactgttggaacaaagacgttcttggtccatcgtgagtggttcatggacctcaacctcccttggagcagtgctggaagtactgtgtggaggaacagagagacgttaatggagtttgaggaaccacacgccacgaagcagtctgtgatagcattgggctcacaagagggagctctgcatcaagctttggctggagccattcctgtggaattttcaagcaacactgtcaagttgacgtcgggtcatttgaagtgtagagtgaagatggaaaaattgcagttgaagggaacaacctatggcgtctgttcaaaggctttcaagtttcttgggactcccgcagacacaggtcacggcactgtggtgttggaattgcagtacactggcacggatggaccttgcaaagttcctatctcgtcagtggcttcattgaacgacctaacgccagtgggcagattggtcactgtcaacccttttgtttcagtggccacggccaacgctaaggtcctgattgaattggaaccaccctttggagactcatacatagtggtgggcagaggagaacaacagattaatcaccattggcacaagtctggaagcagcattggcaaagcctttacaaccaccctcaaaggagcgcagagactagccgctctaggagacacagcttgggactttggatcagttggaggggtgttcacctcagttgggaaggctgtccatcaaacaatgatgtggaggcttggatggaccggtacaagtattaccctgaaacgccacaaggcctagccaagatcattcagaaagctcataaggaaggagtgtgcggtctacgatcagtttccagactggagcatcaaatgtgggaagcagtgaaggacgagctgaacactcttttgaaggagaatggtgtggaccttagtgtcgtggttgagaaacaggagggaatgtacaagtcagcacctaaacgcctcaccgccaccacggaaaaactggaaattggctggaaggcctggggaaagagtattttatttgcaccagaactcgccaacaacacctttgtggttgatggtccggagaccaaggaatgtccgactcagaatcgcgcttggaatagcttagaagtggaggattttggatttggtctcaccagcactcggatgttcctgaaggtcagagagagcaacacaactgaatgtgactcgaagatcattggaacggctgtcaagaacaacttggcgatccacagtgacctgtcctattggattgaaagcaggctcaatgatacgtggaagcttgaaagggcagttctgggtgaagtcaaatcatgtacgtggcctgagacgcataccttgtggggcgatggaatccttgagagtgacttgataataccagtcacactggcgggaccacgaagcaatcacaatcggagacctgggtacaagacacaaaaccagggcccatgggacgaaggccgggtagagattgacttcgattactgcccaggaactacggtcaccctgagtgagagctgcggacaccgtggacctgccactcgcaccaccacagagagcggaaagttgataacagattggtgctgcaggagctgcaccttaccaccactgcgctaccaaactgacagcggctgttggtatggtatggagatcagaccacagagacatgatgaaaagaccctcgtgcagtcacaagtgaatgcttataatgctgatatgattgacccttttcagttgggccttctggtcgtgttcttggccacccaggaggtccttcgcaagaggtggacagccaagatcagcatgccagctatactgattgctctgctagtcctggtgtttgggggcattacttacactgatgtgttacgctatgtcatcttggtgggggcagctttcgcagaatctaattcgggaggagacgtggtacacttggcgctcatggcgaccttcaagatacaaccagtgtttatggtggcatcgtttctcaaagcgagatggaccaaccaggagaacattttgttgatgttggcggctgttttctttcaaatggcttatcacgatgcccgccaaattctgctctgggagatccctgatgtgttgaattcactggcggtagcttggatgatactgagagccataacattcacaacgacatcaaacgtggttgttccgctgctagccctgctaacacccgggctgagatgcttgaatctggatgtgtacaggatactgctgttgatggtcggaataggcagcttgatcagggagaagaggagtgcagctgcaaaaaagaaaggagcaagtctgctatgcttggctctagcctcaacaggacttttcaaccccatgatccttgctgctggactgattgcatgtgatcccaaccgtaaacgcggatggcccgcaactgaagtgatgacagctgtcggcctaatgtttgccatcgtcggagggctggcagagcttgacattgactccatggccattccaatgactatcgcggggctcatgtttgctgctttcgtgatttctgggaaatcaacagatatgtggattgagagaacggcggacatttcctgggaaagtgatgcagaaattacaggctcgagcgaaagagttgatgtgcggcttgatgatgatggaaacttccagctcatgaatgatccaggagcaccttggaagatatggatgctcagaatggtctgtctcgcgattagtgcgtacaccccctgggcaatcttgccctcagtagttggattttggataactctccaatacacaaagagaggaggtgtgttgtgggacactccctcaccaaaggagtacaaaaagggggacacgaccaccggcgtctacaggatcatgactcgtgggctgctcggcagttatcaagcaggagcgggcgtgatggttgaaggtgttttccacaccctttggcatacaacaaaaggagccgctttgatgagcggagagggccgcctggacccatactggggcagtgtcaaggaggatcgactttgttacggaggaccctggaaattgcagcacaagtggaacgggcaggatgaggtgcagatgattgtggtggaacctggcaagaacgttaagaacgtccagacgaaaccaggggtgttcaaaacacctgaaggagaaatcggggccgtgactttggacttccccactggaacatcaggctcaccaatagtggacaaaaacggtgatgtgattgggctttatggcaatggagtcataatgcccaacggctcatacataagcgcgatagtgcagggtgaaaggatggatgagccaatcccagccggattcgaacctgagatgctgaggaaaaaacagatcactgtactggatctccatcccggcgccggtaaaacaaggaggattctgccacagatcatcaaagaggccataaacagaagactgagaacagccgtgctagcaccaaccagggttgtggctgctgagatggctgaagcactgagaggactgcccatccggtaccagacatccgcagtgcccagagaacataatggaaatgagattgttgatgtcatgtgtcatgctaccctcacccacaggctgatgtctcctcacagggtgccgaactacaacctgttcgtgatggatgaggctcatttcaccgacccagctagtatcgcagcaagaggttacatttccacaaaggtcgagctaggggaggcggcggcaatattcatgacagccaccccaccaggcacttcagatccattcccagagtccaattcaccaatttccgacttacagactgagatcccggatcgagcttggaactctggatacgaatggatcacagaatacaccgggaagacggtttggtttgtgcctagtgtcaagatggggaatgagattgccctttgcctacaacgtgctggaaagaaagtagtccaattgaacagaaagtcgtacgagacggagtacccaaaatgtaagaacgatgattgggactttgttatcacaacagacatatctgaaatgggggctaacttcaaggcgagcagggtgattgacagccggaagagtgtgaaaccaaccatcataacagaaggagaagggagagtgatcctgggagaaccatctgcagtgacagcagctagtgccgcccagagacgtggacgtatcggtagaaatccgtcgcaagttggtgatgagtactgttatggggggcacacgaatgaagacgactcgaacttcgcccattggactgaggcacgaatcatgctggacaacatcaacatgccaaacggactgatcgctcaattctaccaaccagagcgtgagaaggtatataccatggatggggaataccggctcagaggagaagagaggaaaaactttctggaactgttgaggactgcagatctgccagtttggctggcttacaaggttgcagcggctggagtgtcataccacgaccggaggtggtgctttgatggtcctaggacaaacacaattttagaagacaacaacgaagtggaagtcatcacgaagcttggtgaaaggaagattctgaggccgcgctggattgacgccagggtgtactcggatcaccaggcactaaaggcgttcaaggacttcgcctcgggaaaacgttctcagatagggctcattgaggttctgggaaagatgcctgagcacttcatggggaagacatgggaagcacttgacaccatgtacgtagtggccactgcagagaaaggaggaagagctcacagaatggccctggaggaactgccagatgctcttcagacaattgccttgattgccttattgagtgtgatgaccatgggagtattcttcctcctcatgcagcggaagggcattggaaagataggtttgggaggcgctgtcttgggagtcgcgacctttttctgttggatggctgaagttccaggaacgaagatcgccggaatgttgctgctctcccttctcttgatgattgtgctaattcctgagccagagaagcaacgttcgcagacagacaaccagctagccgtgttcctgatttgtgtcatgacccttgtgagcgcagtggcagccaacgagatgggttggctagataagaccaagagtgacataagcagtttgtttgggcaaagaattgaggtcaaggagaatttcagcatgggagagtttcttctggacttgaggccggcaacagcctggtcactgtacgctgtgacaacagcggtcctcactccactgctaaagcatttgatcacgtcagattacatcaacacctcattgacctcaataaacgttcaggcaagtgcactattcacactcgcgcgaggcttccccttcgtcgatgttggagtgtcggctctcctgctagcagccggatgctggggacaagtcaccctcaccgttacggtaacagcggcaacactccttttttgccactatgcctacatggttcccggttggcaagctgaggcaatgcgctcagcccagcggcggacagcggccggaatcatgaagaacgctgtagtggatggcatcgtggccacggacgtcccagaattagagcgcaccacacccatcatgcagaagaaagttggacagatcatgctgatcttggtgtctctagctgcagtagtagtgaacccgtctgtgaagacagtacgagaagccggaattttgatcacggccgcagcggtgacgctttgggagaatggagcaagctctgtttggaacgcaacaactgccatcggactctgccacatcatgcgtgggggttggttgtcatgtctatccataacatggacactcataaagaacatggaaaaaccaggactaaaaagaggtggggcaaaaggacgcaccttgggagaggtttggaaagaaagactcaaccagatgacaaaagaagagttcactaggtaccgcaaagaggccatcatcgaagtcgatcgctcagcggcaaaacacgccaggaaagaaggcaatgtcactggagggcattcagtctctaggggcacagcaaaactgagatggctggtcgaacggaggtttctcgaaccggtcggaaaagtgattgaccttggatgtggaagaggcggttggtgttactatatggcaacccaaaaaagagtccaagaagtcagagggtacacaaagggcggtcccggacatgaagagccccaactagtgcaaagttatggatggaacattgtcaccatgaagagtggagtggatgtgttctacagaccttctgagtgttgtgacaccctcctttgtgacatcggagagtcctcgtcaagtgctgaggttgaagagcataggacgattcgtgtccttgaaatggttgaggactggctgcaccgagggccaagggaattttgcgtgaaggtgctctgcccctacatgccgaaagtcatagagaagatggagctgctccaacgccggtatggggggggactggtcagaaacccactctcacggaattccacgcacgagatgtattgggtgagtcgagcttcaggcaatgtggtacattcagtgaatatgaccagccaggtgctcctaggaagaatggaaaaaaggacctggaagggaccccaatacgaggaagatgtaaacttgggaagtggaaccagggcggtgggaaaacccctgctcaactcagacaccagtaaaatcaagaacaggattgaacgactcaggcgtgagtacagttcgacgtggcaccacgatgagaaccacccatatagaacctggaactatcacggcagttatgatgtgaagcccacaggctccgccagttcgctggtcaatggagtggtcaggctcctctcaaaaccatgggacaccatcacgaatgttaccaccatggccatgactgacactactcccttcgggcagcagcgagtgttcaaagagaaggtggacacgaaagctcctgaaccgccagaaggagcgaagtacgtgctcaacgagaccaccaactggttgtgggcgtttttggccagagaaaaacgtcccagaatgtgctctcgagaggaattcataagaaaggtcaacagcaatgcagctttgggtgccatgtttgaagagcagaatcaatggaggagcgccagagaagcagttgaagatccaaaattttgggagatggtggatgaggagcgcgaggcacatctgcggggggaatgtcacacttgcatttacaacatgatgggaaagagagagaaaaaacccggagagttcggaaaggccaagggaagcagagccatttggttcatgtggctcggagctcgctttctggagttcgaggctctgggttttctcaatgaagaccactggcttggaagaaagaactcaggaggaggtgtcgagggcttgggcctccaaaaactgggttacatcctgcgtgaagttggcacccggcctgggggcaagatctatgctgatgacacagctggctgggacacccgcatcacgagagctgacttggaaaatgaagctaaggtgcttgagctgcttgatggggaacatcggcgtcttgccagggccatcattgagctcacctatcgtcacaaagttgtgaaagtgatgcgcccggctgctgatggaagaaccgtcatggatgttatctccagagaagatcagagggggagtggacaagttgtcacctacgccctaaacactttcaccaacctggccgtccagctggtgaggatgatggaaggggaaggagtgattggcccagatgatgtggagaaactcacaaaagggaaaggacccaaagtcaggacctggctgtttgagaatggggaagaaagactcagccgcatggctgtcagtggagatgactgtgtggtaaagcccctggacgatcgctttgccacctcgctccacttcctcaatgctatgtcaaaggttcgcaaagacatccaagagtggaaaccgtcaactggatggtatgattggcagcaggttccattttgctcaaaccatttcactgaattgatcatgaaagatggaagaacactggtggttccatgccgaggacaggatgaattggtaggcagagctcgcatatctccaggggccggatggaacgtccgcgacactgcttgtctggctaagtcttatgcccagatgtggctgcttctgtacttccacagaagagacctgcggctcatggccaacgccatttgctccgctgtccctgtgaattgggtccctaccggaagaaccacgtggtccatccatgcaggaggagagtggatgacaacagaggacatgttggaggtctggaaccgtgtttggatagaggagaatgaatggatggaagacaaaaccccagtggagaaatggagtgacgtcccatattcaggaaaacgagaggacatctggtgtggcagcctgattggcacaagagcccgagccacgtgggcagaaaacatccaggtggctatcaaccaagtcagagcaatcatcggagatgagaagtatgtggattacatgagttcactaaagagatatgaagacacaactttggttgaggacacagtactgtagatatttaatcaattgtaaatagacaatataagtatgcataaaagtgtagttttatagtagtatttagtggtgttagtgtaaatagttaagaaaattttgaggagaaagtcaggccgggaagttcccgccaccggaagttgagtagacggtgctgcctgcgactcaaccccaggaggactgggtgaacaaagccgcgaagtgatccatgtaagccctcagaaccgtctcggaaggaggaccccacatgttgtaacttcaaagcccaatgtcagaccacgctacggcgtgctactctgcggagagtgcagtctgcgatagtgccccaggaggactgggttaacaaaggcaaatcaacgccccacgcggccctagccccggtaatggtgttaaccagggcgaaaggactagaggttagaggagaccccgcggtttaaagtgcacggcccagcctggctgaagctgtaggtcaggggaaggactagaggttagtggagaccccgtgccacaaaacaccacaacaaaacagcatattgacacctgggatagactaggagatcttctgctctgcacaaccagccacacggcacagtgcgccgacaatggtggctggtggtgcgagaacacaggatct

SEQ ID NO: 107 - DNA, 10978 bp, Artificial Sequence
  Synthetic sequence
agtagttcgcctgtgtgagctgacaaacttagtagtgtttgtgaggattaacaacaattaacacagtgcgagctgtttcttagcacgaagatctcgatgtctaagaaaccaggagggcccggcaagagccgggctgtcaatatgctaaaacgcggaatgccccgcgtgttgtccttgattggactgaagagggctatgttgagcctgatcgacggcaaggggccaatacgatttgtgttggctctcttggcgttcttcaggttcacagcaattgctccgacccgagcagtgctggatcgatggagaggtgtgaataaacaaacagcgatgaaacaccttctgagttttaagaaggaactagggaccttgaccagtgctatcaatcggcggagctcaaaacaaaagaaaagaggaggaaagaccggaattgcagtcatgattggcctgatcgccagcgtaggagcagttaccctctctaacttccaagggaaggtgatgatgacggtaaatgctactgacgtcacagatgtcatcacgattccaacagctgctggaaagaacctatgcattgtcagagcaatggatgtgggatacatgtgcgatgatactatcacttatgaatgcccagtgctgtcggctggtaatgatccagaagacatcgactgttggtgcacaaagtcagcagtctacgtcaggtatggaagatgcaccaagacacgccactcaagacgcagtcggaggtcactgacagtgcagacacacggagaaagcactctagcgaacaagaagggggcttggatggacagcaccaaggccacaaggtatttggtaaaaacagaatcatggatcttgaggaaccctggatatgccctggtggcagccgtcattggttggatgcttgggagcaacaccatgcagagagttgtgtttgtcgtgctattgcttttggtggccccagcttacagctttaactgccttggaatgagcaacagagacttcttggaaggagtgtctggagcaacatgggtggatttggttctcgaaggcgacagctgcgtgactatcatgtctaaggacaagcctaccatcgatgtgaagatgatgaatatggaggcggccaacctggcagaggtccgcagttattgctatttggctaccgtcagcgatctctccaccaaagctgcgtgcccgaccatgggagaagctcacaatgacaaacgtgctgacccagcttttgtgtgcagacaaggagtggtggacaggggctggggcaacggctgcggactatttggcaaaggaagcattgacacatgcgccaaatttgcctgctctaccaaggcaataggaagaaccatcttgaaagagaatatcaagtacgaagtggccatttttgtccatggaccaactactgtggagtcgcacggaaactactccacacaggttggagccactcaggcagggagattcagcatcactcctgcggcgccttcatacacactaaagcttggagaatatggagaggtgacagtggactgtgaaccacggtcagggattgacaccaatgcatactacgtgatgactgttggaacaaagacgttcttggtccatcgtgagtggttcatggacctcaacctcccttggagcagtgctggaagtactgtgtggaggaacagagagacgttaatggagtttgaggaaccacacgccacgaagcagtctgtgatagcattgggctcacaagagggagctctgcatcaagctttggctggagccattcctgtggaattttcaagcaacactgtcaagttgacgtcgggtcatttgaagtgtagagtgaagatggaaaaattgcagttgaagggaacaacctatggcgtctgttcaaaggctttcaagtttcttgggactcccgcagacacaggtcacggcactgtggtgttggaattgcagtacactggcacggatggaccttgcaaagttcctatctcgtcagtggcttcattgaacgacctaacgccagtgggcagattggtcactgtcaacccttttgtttcagtggccacggccaacgctaaggtcctgattgaattggaaccaccctttggagactcatacatagtggtgggcagaggagaacaacagattaatcaccattggcacaagtctggaagcagcattggcaaagcctttacaaccaccctcaaaggagcgcagagactagccgctctaggagacacagcttgggactttggatcagttggaggggtgttcacctcagttgggaaggctgtccatcaagtgttcggaggagcattccgctcactgttcggaggcatgtcctggataacgcaaggattgctgggggctctcctgttgtggatgggcatcaatgctcgtgataggtccatagctctcacgtttctcgcagttggaggagttctgctcttcctctccgtgaacgtgcacgctgacactgggtgtgccatagacatcagccggcaagagctgagatgtggaagtggagtgttcatacacaatgatgtggaggcttggatggaccggtacaagtattaccctgaaacgccacaaggcctagccaagatcattcagaaagctcataaggaaggagtgtgcggtctacgatcagtttccagactggagcatcaaatgtgggaagcagtgaaggacgagctgaacactcttttgaaggagaatggtgtggaccttagtgtcgtggttgagaaacaggagggaatgtacaagtcagcacctaaacgcctcaccgccaccacggaaaaactggaaattggctggaaggcctggggaaagagtattttatttgcaccagaactcgccaacaacacctttgtggttgatggtccggagaccaaggaatgtccgactcagaatcgcgcttggaatagcttagaagtggaggattttggatttggtctcaccagcactcggatgttcctgaaggtcagagagagcaacacaactgaatgtgactcgaagatcattggaacggctgtcaagaacaacttggcgatccacagtgacctgtcctattggattgaaagcaggctcaatgatacgtggaagcttgaaagggcagttctgggtgaagtcaaatcatgtacgtggcctgagacgcataccttgtggggcgatggaatccttgagagtgacttgataataccagtcacactggcgggaccacgaagcaatcacaatcggagacctgggtacaagacacaaaaccagggcccatgggacgaaggccgggtagagattgacttcgattactgcccaggaactacggtcaccctgagtgagagctgcggacaccgtggacctgccactcgcaccaccacagagagcggaaagttgataacagattggtgctgcaggagctgcaccttaccaccactgcgctaccaaactgacagcggctgttggtatggtatggagatcagaccacagagacatgatgaaaagaccctcgtgcagtcacaagtgaatgcttataatgctgatatgattgacccttttcagttgggccttctggtcgtgttcttggccacccaggaggtccttcgcaagaggtggacagccaagatcagcatgccagctatactgattgctctgctagtcctggtgtttgggggcattacttacactgatgtgttacgctatgtcatcttggtgggggcagctttcgcagaatctaattcgggaggagacgtggtacacttggcgctcatggcgaccttcaagatacaaccagtgtttatggtggcatcgtttctcaaagcgagatggaccaaccaggagaacattttgttgatgttggcggctgttttctttcaaatggcttatcacgatgcccgccaaattctgctctgggagatccctgatgtgttgaattcactggcggtagcttggatgatactgagagccataacattcacaacgacatcaaacgtggttgttccgctgctagccctgctaacacccgggctgagatgcttgaatctggatgtgtacaggatactgctgttgatggtcggaataggcagcttgatcagggagaagaggagtgcagctgcaaaaaagaaaggagcaagtctgctatgcttggctctagcctcaacaggacttttcaaccccatgatccttgctgctggactgattgcatgtgatcccaaccgtaaacgcggatggcccgcaactgaagtgatgacagctgtcggcctaatgtttgccatcgtcggagggctggcagagcttgacattgactccatggccattccaatgactatcgcggggctcatgtttgctgctttcgtgatttctgggaaatcaacagatatgtggattgagagaacggcggacatttcctgggaaagtgatgcagaaattacaggctcgagcgaaagagttgatgtgcggcttgatgatgatggaaacttccagctcatgaatgatccaggagcaccttggaagatatggatgctcagaatggtctgtctcgcgattagtgcgtacaccccctgggcaatcttgccctcagtagttggattttggataactctccaatacacaaagagaggaggtgtgttgtgggacactccctcaccaaaggagtacaaaaagggggacacgaccaccggcgtctacaggatcatgactcgtgggctgctcggcagttatcaagcaggagcgggcgtgatggttgaaggtgttttccacaccctttggcatacaacaaaaggagccgctttgatgagcggagagggccgcctggacccatactggggcagtgtcaaggaggatcgactttgttacggaggaccctggaaattgcagcacaagtggaacgggcaggatgaggtgcagatgattgtggtggaacctggcaagaacgttaagaacgtccagacgaaaccaggggtgttcaaaacacctgaaggagaaatcggggccgtgactttggacttccccactggaacatcaggctcaccaatagtggacaaaaacggtgatgtgattgggctttatggcaatggagtcataatgcccaacggctcatacataagcgcgatagtgcagggtgaaaggatggatgagccaatcccagccggattcgaacctgagatgctgaggaaaaaacagatcactgtactggatctccatcccggcgccggtaaaacaaggaggattctgccacagatcatcaaagaggccataaacagaagactgagaacagccgtgctagcaccaaccagggttgtggctgctgagatggctgaagcactgagaggactgcccatccggtaccagacatccgcagtgcccagagaacataatggaaatgagattgttgatgtcatgtgtcatgctaccctcacccacaggctgatgtctcctcacagggtgccgaactacaacctgttcgtgatggatgaggctcatttcaccgacccagctagtatcgcagcaagaggttacatttccacaaaggtcgagctaggggaggcggcggcaatattcatgacagccaccccaccaggcacttcagatccattcccagagtccaattcaccaatttccgacttacagactgagatcccggatcgagcttggaactctggatacgaatggatcacagaatacaccgggaagacggtttggtttgtgcctagtgtcaagatggggaatgagattgccctttgcctacaacgtgctggaaagaaagtagtccaattgaacagaaagtcgtacgagacggagtacccaaaatgtaagaacgatgattgggactttgttatcacaacagacatatctgaaatgggggctaacttcaaggcgagcagggtgattgacagccggaagagtgtgaaaccaaccatcataacagaaggagaagggagagtgatcctgggagaaccatctgcagtgacagcagctagtgccgcccagagacgtggacgtatcggtagaaatccgtcgcaagttggtgatgagtactgttatggggggcacacgaatgaagacgactcgaacttcgcccattggactgaggcacgaatcatgctggacaacatcaacatgccaaacggactgatcgctcaattctaccaaccagagcgtgagaaggtatataccatggatggggaataccggctcagaggagaagagaggaaaaactttctggaactgttgaggactgcagatctgccagtttggctggcttacaaggttgcagcggctggagtgtcataccacgaccggaggtggtgctttgatggtcctaggacaaacacaattttagaagacaacaacgaagtggaagtcatcacgaagcttggtgaaaggaagattctgaggccgcgctggattgacgccagggtgtactcggatcaccaggcactaaaggcgttcaaggacttcgcctcgggaaaacgttctcagatagggctcattgaggttctgggaaagatgcctgagcacttcatggggaagacatgggaagcacttgacaccatgtacgtagtggccactgcagagaaaggaggaagagctcacagaatggccctggaggaactgccagatgctcttcagacaattgccttgattgccttattgagtgtgatgaccatgggagtattcttcctcctcatgcagcggaagggcattggaaagataggtttgggaggcgctgtcttgggagtcgcgacctttttctgttggatggctgaagttccaggaacgaagatcgccggaatgttgctgctctcccttctcttgatgattgtgctaattcctgagccagagaagcaacgttcgcagacagacaaccagctagccgtgttcctgatttgtgtcatgacccttgtgagcgcagtggcagccaacgagatgggttggctagataagaccaagagtgacataagcagtttgtttgggcaaagaattgaggtcaaggagaatttcagcatgggagagtttcttctggacttgaggccggcaacagcctggtcactgtacgctgtgacaacagcggtcctcactccactgctaaagcatttgatcacgtcagattacatcaacacctcattgacctcaataaacgttcaggcaagtgcactattcacactcgcgcgaggcttccccttcgtcgatgttggagtgtcggctctcctgctagcagccggatgctggggacaagtcaccctcaccgttacggtaacagcggcaacactccttttttgccactatgcctacatggttcccggttggcaagctgaggcaatgcgctcagcccagcggcggacagcggccggaatcatgaagaacgctgtagtggatggcatcgtggccacggacgtcccagaattagagcgcaccacacccatcatgcagaagaaagttggacagatcatgctgatcttggtgtctctagctgcagtagtagtgaacccgtctgtgaagacagtacgagaagccggaattttgatcacggccgcagcggtgacgctttgggagaatggagcaagctctgtttggaacgcaacaactgccatcggactctgccacatcatgcgtgggggttggttgtcatgtctatccataacatggacactcataaagaacatggaaaaaccaggactaaaaagaggtggggcaaaaggacgcaccttgggagaggtttggaaagaaagactcaaccagatgacaaaagaagagttcactaggtaccgcaaagaggccatcatcgaagtcgatcgctcagcggcaaaacacgccaggaaagaaggcaatgtcactggagggcattcagtctctaggggcacagcaaaactgagatggctggtcgaacggaggtttctcgaaccggtcggaaaagtgattgaccttggatgtggaagaggcggttggtgttactatatggcaacccaaaaaagagtccaagaagtcagagggtacacaaagggcggtcccggacatgaagagccccaactagtgcaaagttatggatggaacattgtcaccatgaagagtggagtggatgtgttctacagaccttctgagtgttgtgacaccctcctttgtgacatcggagagtcctcgtcaagtgctgaggttgaagagcataggacgattcgtgtccttgaaatggttgaggactggctgcaccgagggccaagggaattttgcgtgaaggtgctctgcccctacatgccgaaagtcatagagaagatggagctgctccaacgccggtatggggggggactggtcagaaacccactctcacggaattccacgcacgagatgtattgggtgagtcgagcttcaggcaatgtggtacattcagtgaatatgaccagccaggtgctcctaggaagaatggaaaaaaggacctggaagggaccccaatacgaggaagatgtaaacttgggaagtggaaccagggcggtgggaaaacccctgctcaactcagacaccagtaaaatcaagaacaggattccatatagaacctggaactatcacggcagttatgatgtgaagcccacaggctccgccagttcgctggtcaatggagtggtcaggctcctctcaaaaccatgggacaccatcacgaatgttaccaccatggccatgactgacactactcccttcgggcagcagcgagtgttcaaagagaaggtggacacgaaagctcctgaaccgccagaaggagcgaagtacgtgctcaacgagaccaccaactggttgtgggcgtttttggccagagaaaaacgtcccagaatgtgctctcgagaggaattcataagaaaggtcaacagcaatgcagctttgggtgccatgtttgaagagcagaatcaatggaggagcgccagagaagcagttgaagatccaaaattttgggagatggtggatgaggagcgcgaggcacatctgcggggggaatgtcacacttgcatttacaacatgatgggaaagagagagaaaaaacccggagagttcggaaaggccaagggaagcagagccatttggttcatgtggctcggagctcgctttctggagttcgaggctctgggttttctcaatgaagaccactggcttggaagaaagaactcaggaggaggtgtcgagggcttgggcctccaaaaactgggttacatcctgcgtgaagttggcacccggcctgggggcaagatctatgctgatgacacagctggctgggacacccgcatcacgagagctgacttggaaaatgaagctaaggtgcttgagctgcttgatggggaacatcggcgtcttgccagggccatcattgagctcacctatcgtcacaaagttgtgaaagtgatgcgcccggctgctgatggaagaaccgtcatggatgttatctccagagaagatcagagggggagtggacaagttgtcacctacgccctaaacactttcaccaacctggccgtccagctggtgaggatgatggaaggggaaggagtgattggcccagatgatgtggagaaactcacaaaagggaaaggacccaaagtcaggacctggctgtttgagaatggggaagaaagactcagccgcatggctgtcagtggagatgactgtgtggtaaagcccctggacgatcgctttgccacctcgctccacttcctcaatgctatgtcaaaggttcgcaaagacatccaagagtggaaaccgtcaactggatggtatgattggcagcaggttccattttgctcaaaccatttcactgaattgatcatgaaagatggaagaacactggtggttccatgccgaggacaggatgaattggtaggcagagctcgcatatctccaggggccggatggaacgtccgcgacactgcttgtctggctaagtcttatgcccagatgtggctgcttctgtacttccacagaagagacctgcggctcatggccaacgccatttgctccgctgtccctgtgaattgggtccctaccggaagaaccacgtggtccatccatgcaggaggagagtggatgacaacagaggacatgttggaggtctggaaccgtgtttggatagaggagaatgaatggatggaagacaaaaccccagtggagaaatggagtgacgtcccatattcaggaaaacgagaggacatctggtgtggcagcctgattggcacaagagcccgagccacgtgggcagaaaacatccaggtggctatcaaccaagtcagagcaatcatcggagatgagaagtatgtggattacatgagttcactaaagagatatgaagacacaactttggttgaggacacagtactgtagatatttaatcaattgtaaatagacaatataagtatgcataaaagtgtagttttatagtagtatttagtggtgttagtgtaaatagttaagaaaattttgaggagaaagtcaggccgggaagttcccgccaccggaagttgagtagacggtgctgcctgcgactcaaccccaggaggactgggtgaacaaagccgcgaagtgatccatgtaagccctcagaaccgtctcggaaggaggaccccacatgttgtaacttcaaagcccaatgtcagaccacgctacggcgtgctactctgcggagagtgcagtctgcgatagtgccccaggaggactgggttaacaaaggcaaatcaacgccccacgcggccctagccccggtaatggtgttaaccagggcgaaaggactagaggttagaggagaccccgcggtttaaagtgcacggcccagcctggctgaagctgtaggtcaggggaaggactagaggttagtggagaccccgtgccacaaaacaccacaacaaaacagcatattgacacctgggatagactaggagatcttctgctctgcacaaccagccacacggcacagtgcgccgacaatggtggctggtggtgcgagaacacaggatct

SEQ ID NO: 108 - DNA, 10947 bp, Artificial Sequence
  Synthetic sequence
agtagttcgcctgtgtgagctgacaaacttagtagtgtttgtgaggattaacaacaattaacacagtgcgagctgtttcttagcacgaagatctcgatgtctaagaaaccaggagggcccggcaagagccgggctgtcaatatgctaaaacgcggaatgccccgcgtgttgtccttgattggactgaagagggctatgttgagcctgatcgacggcaaggggccaatacgatttgtgttggctctcttggcgttcttcaggttcacagcaattgctccgacccgagcagtgctggatcgatggagaggtgtgaataaacaaacagcgatgaaacaccttctgagttttaagaaggaactagggaccttgaccagtgctatcaatcggcggagctcaaaacaaaagaaaagaggaggaaagaccggaattgcagtcatgattggcctgatcgccagcgtaggagcagttaccctctctaacttccaagggaaggtgatgatgacggtaaatgctactgacgtcacagatgtcatcacgattccaacagctgctggaaagaacctatgcattgtcagagcaatggatgtgggatacatgtgcgatgatactatcacttatgaatgcccagtgctgtcggctggtaatgatccagaagacatcgactgttggtgcacaaagtcagcagtctacgtcaggtatggaagatgcaccaagacacgccactcaagacgcagtcggaggtcactgacagtgcagacacacggagaaagcactctagcgaacaagaagggggcttggatggacagcaccaaggccacaaggtatttggtaaaaacagaatcatggatcttgaggaaccctggatatgccctggtggcagccgtcattggttggatgcttgggagcaacaccatgcagagagttgtgtttgtcgtgctattgcttttggtggccccagcttacagctttaactgccttggaatgagcaacagagacttcttggaaggagtgtctggagcaacatgggtggatttggttctcgaaggcgacagctgcgtgactatcatgtctaaggacaagcctaccatcgatgtgaagatgatgaatatggaggcggccaacctggcagaggtccgcagttattgctatttggctaccgtcagcgatctctccaccaaagctgcgtgcccgaccatgggagaagctcacaatgacaaacgtgctgacccagcttttgtgtgcagacaaggagtggtggacaggggctggggcaacggctgcggactatttggcaaaggaagcattgacacatgcgccaaatttgcctgctctaccaaggcaataggaagaaccatcttgaaagagaatatcaagtacgaagtggccatttttgtccatggaccaactactgtggagtcgcacggaaactactccacacaggttggagccactcaggcagggagattcagcatcactcctgcggcgccttcatacacactaaagcttggagaatatggagaggtgacagtggactgtgaaccacggtcagggattgacaccaatgcatactacgtgatgactgttggaacaaagacgttcttggtccatcgtgagtggttcatggacctcaacctcccttggagcagtgctggaagtactgtgtggaggaacagagagacgttaatggagtttgaggaaccacacgccacgaagcagtctgtgatagcattgggctcacaagagggagctctgcatcaagctttggctggagccattcctgtggaattttcaagcaacactgtcaagttgacgtcgggtcatttgaagtgtagagtgaagatggaaaaattgcagttgaagggaacaacctatggcgtctgttcaaaggctttcaagtttcttgggactcccgcagacacaggtcacggcactgtggtgttggaattgcagtacactggcacggatggaccttgcaaagttcctatctcgtcagtggcttcattgaacgacctaacgccagtgggcagattggtcactgtcaacccttttgtttcagtggccacggccaacgctaaggtcctgattgaattggaaccaccctttggagactcatacatagtggtgggcagaggagaacaacagattaatcaccattggcacaagtctggaagcagcattggcaaagcctttacaaccaccctcaaaggagcgcagagactagccgctctaggagacacagcttgggactttggatcagttggaggggtgttcacctcagttgggaaggctgtccatcaagtgttcggaggagcattccgctcactgttcggaggcatgtcctggataacgcaaggattgctgggggctctcctgttgtggatgggcatcaatgctcgtgataggtccatagctctcacgtttctcgcagttggaggagttctgctcttcctctccgtgaacgtgcacgctgacactgggtgtgccatagacatcagccggcaagagctgagatgtggaagtggagtgttcatacacaatgatgtggaggcttggatggaccggtacaagtattaccctgaaacgccacaaggcctagccaagatcattcagaaagctcataaggaaggagtgtgcggtctacgatcagtttccagactggagcatcaaatgtgggaagcagtgaaggacgagctgaacactcttttgaaggagaatggtgtggaccttagtgtcgtggttgagaaacaggagggaatgtacaagtcagcacctaaacgcctcaccgccaccacggaaaaactggaaattggctggaaggcctggggaaagagtattttatttgcaccagaactcgccaacaacacctttgtggttgatggtccggagaccaaggaatgtccgactcagaatcgcgcttggaatagcttagaagtggaggattttggatttggtctcaccagcactcggatgttcctgaaggtcagagagagcaacacaactgaatgtgactcgaagatcattggaacggctgtcaagaacaacttggcgatccacagtgacctgtcctattggattgaaagcaggctcaatgatacgtggaagcttgaaagggcagttctgggtgaagtcaaatcatgtacgtggcctgagacgcataccttgtggggcgatggaatccttgagagtgacttgataataccagtcacactggcgggaccacgaagcaatcacaatcggagacctgggtacaagacacaaaaccagggcccatgggacgaaggccgggtagagattgacttcgattactgcccaggaactacggtcaccctgagtgagagctgcggacaccgtggacctgccactcgcaccaccacagagagcggaaagttgataacagattggtgctgcaggagctgcaccttaccaccactgcgctaccaaactgacagcggctgttggtatggtatggagatcagaccacagagacatgatgaaaagaccctcgtgcagtcacaagtgaatgcttataatgctgatatgattgacccttttcagttgggccttctggtcgtgttcttggccacccaggaggtccttcgcaagaggtggacagccaagatcagcatgccagctatactgattgctctgctagtcctggtgtttgggggcattacttacactgatgtgttacgctatgtcatcttggtgggggcagctttcgcagaatctaattcgggaggagacgtggtacacttggcgctcatggcgaccttcaagatacaaccagtgtttatggtggcatcgtttctcaaagcgagatggaccaaccaggagaacattttgttgatgttggcggctgttttctttcaaatggcttatcacgatgcccgccaaattctgctctgggagatccctgatgtgttgaattcactggcggtagcttggatgatactgagagccataacattcacaacgacatcaaacgtggttgttccgctgctagccctgctaacacccgggctgagatgcttgaatctggatgtgtacaggatactgctgttgatggtcggaataggcagcttgatcagggagaagaggagtgcagctgcaaaaaagaaaggagcaagtctgctatgcttggctctagcctcaacaggacttttcaaccccatgatccttgctgctggactgattgcatgtgatcccaaccgtaaacgcggatggcccgcaactgaagtgatgacagctgtcggcctaatgtttgccatcgtcggagggctggcagagcttgacattgactccatggccattccaatgactatcgcggggctcatgtttgctgctttcgtgatttctgggaaatcaacagatatgtggattgagagaacggcggacatttcctgggaaagtgatgcagaaattacaggctcgagcgaaagagttgatgtgcggcttgatgatgatggaaacttccagctcatgaatgatccaggagcaccttggaagatatggatgctcagaatggtctgtctcgcgattagtgcgtacaccccctgggcaatcttgccctcagtagttggattttggataactctccaatacacaaagagaggaggtgtgttgtgggacactccctcaccaaaggagtacaaaaagggggacacgaccaccggcgtctacaggatcatgactcgtgggctgctcggcagttatcaagcaggagcgggcgtgatggttgaaggtgttttccacaccctttggcatacaacaaaaggagccgctttgatgagcggagagggccgcctggacccatactggggcagtgtcaaggaggatcgactttgttacggaggaccctggaaattgcagcacaagtggaacgggcaggatgaggtgcagatgattgtggtggaacctggcaagaacgttaagaacgtccagacgaaaccaggggtgttcaaaacacctgaaggagaaatcggggccgtgactttggacttccccactggaacatcaggctcaccaatagtggacaaaaacggtgatgtgattgggctttatggcaatggagtcataatgcccaacggctcatacataagcgcgatagtgcagggtgaaaggatggatgagccaatcccagccggattcgaacctgagatgctgaggaaaaaacagatcactgtactggatctccatcccggcgccggtaaaacaaggaggattctgccacagatcatcaaagaggccataaacagaagactgagaacagccgtgctagcaccaaccagggttgtggctgctgagatggctgaagcactgagaggactgcccatccggtaccagacatccgcagtgcccagagaacataatggaaatgagattgttgatgtcatgtgtcatgctaccctcacccacaggctgatgtctcctcacagggtgccgaactacaacctgttcgtgatggatgaggctcatttcaccgacccagctagtatcgcagcaagaggttacatttccacaaaggtcgagctaggggaggcggcggcaatattcatgacagccaccccaccaggcacttcagatccattcccagagtccaattcaccaatttccgacttacagactgagatcccggatcgagcttggaactctggatacgaatggatcacagaatacaccgggaagacggtttggtttgtgcctagtgtcaagatggggaatgagattgccctttgcctacaacgtgctggaaagaaagtagtccaattgaacagaaagtcgtacgagacggagtacccaaaatgtaagaacgatgattgggactttgttatcacaacagacatatctgaaatgggggctaacttcaaggcgagcagggtgattgacagccggaagagtgtgaaaccaaccatcataacagaaggagaagggagagtgatcctgggagaaccatctgcagtgacagcagctagtgccgcccagagacgtggacgtatcggtagaaatccgtcgcaagttggtgatgagtactgttatggggggcacacgaatgaagacgactcgaacttcgcccattggactgaggcacgaatcatgctggacaacatcaacatgccaaacggactgatcgctcaattctaccaaccagagcgtgagaaggtatataccatggatggggaataccggctcagaggagaagagaggaaaaactttctggaactgttgaggactgcagatctgccagtttggctggcttacaaggttgcagcggctggagtgtcataccacgaccggaggtggtgctttgatggtcctaggacaaacacaattttagaagacaacaacgaagtggaagtcatcacgaagcttggtgaaaggaagattctgaggccgcgctggattgacgccagggtgtactcggatcaccaggcactaaaggcgttcaaggacttcgcctcgggaaaacgttctcagatagggctcattgaggttctgggaaagatgcctgagcacttcatggggaagacatgggaagcacttgacaccatgtacgtagtggccactgcagagaaaggaggaagagctcacagaatggccctggaggaactgccagatgctcttcagacaattgccttgattgccttattgagtgtgatgaccatgggagtattcttcctcctcatgcagcggaagggcattggaaagataggtttgggaggcgctgtcttgggagtcgcgacctttttctgttggatggctgaagttccaggaacgaagatcgccggaatgttgctgctctcccttctcttgatgattgtgctaattcctgagccagagaagcaacgttcgcagacagacaaccagctagccgtgttcctgatttgtgtcatgacccttgtgagcgcagtggcagccaacgagatgggttggctagataagaccaagagtgacataagcagtttgtttgggcaaagaattgaggtcaaggagaatttcagcatgggagagtttcttctggacttgaggccggcaacagcctggtcactgtacgctgtgacaacagcggtcctcactccactgctaaagcatttgatcacgtcagattacatcaacacctcattgacctcaataaacgttcaggcaagtgcactattcacactcgcgcgaggcttccccttcgtcgatgttggagtgtcggctctcctgctagcagccggatgctggggacaagtcaccctcaccgttacggtaacagcggcaacactccttttttgccactatgcctacatggttcccggttggcaagctgaggcaatgcgctcagcccagcggcggacagcggccggaatcatgaagaacgctgtagtggatggcatcgtggccacggacgtcccagaattagagcgcaccacacccatcatgcagaagaaagttggacagatcatgctgatcttggtgtctctagctgcagtagtagtgaacccgtctgtgaagacagtacgagaagccggaattttgatcacggccgcagcggtgacgctttgggagaatggagcaagctctgtttggaacgcaacaactgccatcggactctgccacatcatgcgtgggggttggttgtcatgtctatccataacatggacactcataaagaacatggaaaaaccaggactaaaaagaggtggggcaaaaggacgcaccttgggagaggtttggaaagaaagactcaaccagatgacaaaagaagagttcactaggtaccgcaaagaggccatcatcgaagtcgatcgctcagcggcaaaacacgccaggaaagaaggcaatgtcactggagggcattcagtctctaggggcacagcaaaactgagatggctggtcgaacggaggtttctcgaaccggtcggaaaagtgattgaccttggatgtggaagaggcggttggtgttactatatggcaacccaaaaaagagtccaagaagtcagagggtacacaaagggcggtcccggacatgaagagccccaactagtgcaaagttatggatggaacattgtcaccatgaagagtggagtggatgtgttctacagaccttctgagtgttgtgacaccctcctttgtgacatcggagagtcctcgtcaagtgctgaggttgaagagcataggacgattcgtgtccttgaaatggttgaggactggctgcaccgagggccaagggaattttgcgtgaaggtgctctgcccctacatgccgaaagtcatagagaagatggagctgctccaacgccggtatggggggggactggtcagaaacccactctcacggaattccacgcacgagatgtattgggtgagtcgagcttcaggcaatgtggtacattcagtgaatatgaccagccaggtgctcctaggaagaatggaaaaaaggacctggaagggaccccaatacgaggaagatgtaaacttgggaagtggaaccagggcggtgggaaaacccctgctcaactcagacaccagtaaaatcaagaacaggattgaacgactcaggcgtgagtacagttcgacgtggcaccacgatgagaaccacccatatagaacctggaactatcacggcagttatgatgtgaagcccacaggctccgccagttcgctggtcaatggagtggtcaggctcctctcaaaaccatgggacaccatcacgaatgttaccaccatggccatgactgacactactcccttcgggcagcagcgagtgttcaaagagaaggtggacacgaaagctcctgaaccgccagaaggagcgaagtacgtgctcaacgagaccaccaactggttgtgggcgtttttggccagagaaaaacgtcccagaatgtgctctcgagaggaattcataagaaaggtcaacagcaatgcagctttgggtgccatgtttgaagagcagaatcaatggaggagcgccagagaagcagttgaagatccaaaattttgggagatggtggatgaggagcgcgaggcacatctgcggggggaatgtcacacttgcatttacaacatgatgggaaagagagagaaaaaacccggagagttcggaaaggccaagggaagcagagccatttggttcatgtggctcggagctcgctttctggagttcgaggctctgggttttctcaatgaagaccactggcttggaagaaagaactcaggaggaggtgtcgagggcttgggcctccaaaaactgggttacatcctgcgtgaagttggcacccggcctgggggcaagatctatgctgatgacacagctggctgggacacccgcatcacgagagctgacttggaaaatgaagctaaggtgcttgagctgcttgatggggaacatcggcgtcttgccagggccatcattgagctcacctatcgtcacaaagttgtgaaagtgatgcgcccggctgctgatggaagaaccgtcatggatgttatctccagagaagatcagagggggagtggacaagttgtcacctacgccctaaacactttcaccaacctggccgtccagctggtgaggatgatggaaggggaaggagtgattggcccagatgatgtggagaaactcacaaaagggaaaggacccaaagtcaggacctggctgtttgagaatggggaagaaagactcagccgcatggctgtcagtggagatgactgtgtggtaaagcccctggacgatcgctttgccacctcgctccacttcctcaatgctatgtcaaaggttcgcaaagacatccaagagtggaaaccgtcaactggatggtatgattggcagcaggttccattttgctcaaaccatttcactgaattgatcatgaaagatggaagaacactggtggttccatgccgaggacaggatgaattggtaggcagagctcgcatatctccaggggccggatggaacgtccgcgacactgcttgtctggctaagtcttatgcccagatgtggctgcttctgtacttccacagaagagacctgcggctcatggccaacgccatttgctccgctgtccctgtgaattgggtccctaccggaagaaccacgtggtccatccatgcaggaggagagtggatgacaacagaggacatgttggaggtctggaaccgtgtttggatagaggagaatgaatggatggaagacaaaaccccagtggagaaatggagtgacgtcccatattcaggaaaacgagaggacatctggtgtggcagcctgattggcacaagagcccgagccacgtgggcagaaaacatccaggtggctatcaaccaagtcagagcaatcatcggagatgagaagtatgtggattacatgagttcactaaagagatatgaagacacaactttggttgaggacacagtactgtagatattaagaaaattttgaggagaaagtcaggccgggaagttcccgccaccggaagttgagtagacggtgctgcctgcgactcaaccccaggaggactgggtgaacaaagccgcgaagtgatccatgtaagccctcagaaccgtctcggaaggaggaccccacatgttgtaacttcaaagcccaatgtcagaccacgctacggcgtgctactctgcggagagtgcagtctgcgatagtgccccaggaggactgggttaacaaaggcaaatcaacgccccacgcggccctagccccggtaatggtgttaaccagggcgaaaggactagaggttagaggagaccccgcggtttaaagtgcacggcccagcctggctgaagctgtaggtcaggggaaggactagaggttagtggagaccccgtgccacaaaacaccacaacaaaacagcatattgacacctgggatagactaggagatcttctgctctgcacaaccagccacacggcacagtgcgccgacaatggtggctggtggtgcgagaacacaggatct

SEQ ID NO: 109 - DNA, 2219 bp, Artificial Sequence
  Synthetic sequence
agtagttcgcctgtgtgagctgacaaacttagtagtgtttgtgaggattaacaacaattaacacagtgcgagctgtttcttagcacgaagatctcgatgtctaagaaaccaggagggcccggcaagagccgggctgtcaatatgctaaaacgcggaatgccccgcgtgttgtccttgattggactgaagagggctatgttgagcctgatcgacggcaaggggccaatacgatttgtgttggctctcttggcgttcttcaggttcacagcaattgctccgacccgagcagtgctggatcgatggagaggtgtgaataaacaaacagcgatgaaacaccttctgagttttaagaaggaactagggaccttgaccagtgctatcaatcggcggagctcaaaacaaaagaaaagaggaggaaagaccggaattgcagtcatgattggcctgatcgccagcgtaggagcagttaccctctctaacttccaagggaaggtgatgatgacggtaaatgctactgacgtcacagatgtcatcacgattccaacagctgctggaaagaacctatgcattgtcagagcaatggatgtgggatacatgtgcgatgatactatcacttatgaatgcccagtgctgtcggctggtaatgatccagaagacatcgactgttggtgcacaaagtcagcagtctacgtcaggtatggaagatgcaccaagacacgccactcaagacgcagtcggaggtcactgacagtgcagacacacggagaaagcactctagcgaacaagaagggggcttggatggacagcaccaaggccacaaggtatttggtaaaaacagaatcatggatcttgaggaaccctggatatgccctggtggcagccgtcattggttggatgcttgggagcaacaccatgcagagagttgtgtttgtcgtgctattgcttttggtggccccagcttacagctttaactgccttggaatgagcaacagagacttcttggaaggagtgtctggagcaacatgggtggatttggttctcgaaggcgacagctgcgtgactatcatgtctaaggacaagcctaccatcgatgtgaagatgatgaatatggaggcggccaacctggcagaggtccgcagttattgctatttggctaccgtcagcgatctctccaccaaagctgcgtgcccgaccatgggagaagctcacaatgacaaacgtgctgacccagcttttgtgtgcagacaaggagtggtggacaggggctggggcaacggctgcggactatttggcaaaggaagcattgacacatgcgccaaatttgcctgctctaccaaggcaataggaagaaccatcttgaaagagaatatcaagtacgaagtggccatttttgtccatggaccaactactgtggagtcgcacggaaactactccacacaggttggagccactcaggcagggagattcagcatcactcctgcggcgccttcatacacactaaagcttggagaatatggagaggtgacagtggactgtgaaccacggtcagggattgacaccaatgcatactacgtgatgactgttgtagatatttaatcaattgtaaatagacaatataagtatgcataaaagtgtagttttatagtagtatttagtggtgttagtgtaaatagttaagaaaattttgaggagaaagtcaggccgggaagttcccgccaccggaagttgagtagacggtgctgcctgcgactcaaccccaggaggactgggtgaacaaagccgcgaagtgatccatgtaagccctcagaaccgtctcggaaggaggaccccacatgttgtaacttcaaagcccaatgtcagaccacgctacggcgtgctactctgcggagagtgcagtctgcgatagtgccccaggaggactgggttaacaaaggcaaatcaacgccccacgcggccctagccccggtaatggtgttaaccagggcgaaaggactagaggttagaggagaccccgcggtttaaagtgcacggcccagcctggctgaagctgtaggtcaggggaaggactagaggttagtggagaccccgtgccacaaaacaccacaacaaaacagcatattgacacctgggatagactaggagatcttctgctctgcacaaccagccacacggcacagtgcgccgacaatggtggctggtggtgcgagaacacaggatct

SEQ ID NO: 110 - DNA, 2932 bp, Artificial Sequence
  Synthetic sequence
agtagttcgcctgtgtgagctgacaaacttagtagtgtttgtgaggattaacaacaattaacacagtgcgagctgtttcttagcacgaagatctcgatgtctaagaaaccaggagggcccggcaagagccgggctgtcaatatgctaaaacgcggaatgccccgcgtgttgtccttgattggactgaagagggctatgttgagcctgatcgacggcaaggggccaatacgatttgtgttggctctcttggcgttcttcaggttcacagcaattgctccgacccgagcagtgctggatcgatggagaggtgtgaataaacaaacagcgatgaaacaccttctgagttttaagaaggaactagggaccttgaccagtgctatcaatcggcggagctcaaaacaaaagaaaagaggaggaaagaccggaattgcagtcatgattggcctgatcgccagcgtaggagcagttaccctctctaacttccaagggaaggtgatgatgacggtaaatgctactgacgtcacagatgtcatcacgattccaacagctgctggaaagaacctatgcattgtcagagcaatggatgtgggatacatgtgcgatgatactatcacttatgaatgcccagtgctgtcggctggtaatgatccagaagacatcgactgttggtgcacaaagtcagcagtctacgtcaggtatggaagatgcaccaagacacgccactcaagacgcagtcggaggtcactgacagtgcagacacacggagaaagcactctagcgaacaagaagggggcttggatggacagcaccaaggccacaaggtatttggtaaaaacagaatcatggatcttgaggaaccctggatatgccctggtggcagccgtcattggttggatgcttgggagcaacaccatgcagagagttgtgtttgtcgtgctattgcttttggtggccccagcttacagctttaactgccttggaatgagcaacagagacttcttggaaggagtgtctggagcaacatgggtggatttggttctcgaaggcgacagctgcgtgactatcatgtctaaggacaagcctaccatcgatgtgaagatgatgaatatggaggcggccaacctggcagaggtccgcagttattgctatttggctaccgtcagcgatctctccaccaaagctgcgtgcccgaccatgggagaagctcacaatgacaaacgtgctgacccagcttttgtgtgcagacaaggagtggtggacaggggctggggcaacggctgcggactatttggcaaaggaagcattgacacatgcgccaaatttgcctgctctaccaaggcaataggaagaaccatcttgaaagagaatatcaagtacgaagtggccatttttgtccatggaccaactactgtggagtcgcacggaaactactccacacaggttggagccactcaggcagggagattcagcatcactcctgcggcgccttcatacacactaaagcttggagaatatggagaggtgacagtggactgtgaaccacggtcagggattgacaccaatgcatactacgtgatgactgttggaacaaagacgttcttggtccatcgtgagtggttcatggacctcaacctcccttggagcagtgctggaagtactgtgtggaggaacagagagacgttaatggagtttgaggaaccacacgccacgaagcagtctgtgatagcattgggctcacaagagggagctctgcatcaagctttggctggagccattcctgtggaattttcaagcaacactgtcaagttgacgtcgggtcatttgaagtgtagagtgaagatggaaaaattgcagttgaagggaacaacctatggcgtctgttcaaaggctttcaagtttcttgggactcccgcagacacaggtcacggcactgtggtgttggaattgcagtacactggcacggatggaccttgcaaagttcctatctcgtcagtggcttcattgaacgacctaacgccagtgggcagattggtcactgtcaacccttttgtttcagtggccacggccaacgctaaggtcctgattgaattggaaccaccctttggagactcatacatagtggtgggcagaggagaacaacagattaatcaccattggcacaagtctggaagcagcattggcaaagcctttacaaccaccctcaaaggagcgcagagactagccgctctaggagacacagcttgggactttggatcagttggaggggtgttcacctcagttgggaaggctgtccatcaatagatatttaatcaattgtaaatagacaatataagtatgcataaaagtgtagttttatagtagtatttagtggtgttagtgtaaatagttaagaaaattttgaggagaaagtcaggccgggaagttcccgccaccggaagttgagtagacggtgctgcctgcgactcaaccccaggaggactgggtgaacaaagccgcgaagtgatccatgtaagccctcagaaccgtctcggaaggaggaccccacatgttgtaacttcaaagcccaatgtcagaccacgctacggcgtgctactctgcggagagtgcagtctgcgatagtgccccaggaggactgggttaacaaaggcaaatcaacgccccacgcggccctagccccggtaatggtgttaaccagggcgaaaggactagaggttagaggagaccccgcggtttaaagtgcacggcccagcctggctgaagctgtaggtcaggggaaggactagaggttagtggagaccccgtgccacaaaacaccacaacaaaacagcatattgacacctgggatagactaggagatcttctgctctgcacaaccagccacacggcacagtgcgccgacaatggtggctggtggtgcgagaacacaggatct

SEQ ID NO: 111 - DNA, 14195 bp, Artificial Sequence
  Synthetic sequence
attaaaggtttataccttcccaggtaacaaaccaaccaactttcgatctcttgtagatctgttctctaaaagaactttaagtcagttctttattatcaaaacaatgtttttatgtctgaagcaaaatgttggactgagactgaccttactaaaggacctcatgaattttgctctcaacatacaatgctagttaaacagggtgatgattatgtgtaccttccttacccagatccatcaagaatcctaggggccggctgttttgtagatgatatcgtaaaaacagatggtacacttatgattgaacggttcgtgtctttagctatagatgcttacccacttactaaacatcctaatcaggagtatgctgatgtctttcatttgtacttacaatacataagaaagctacatgatgagttaacaggacacatgttagacatgtattctgttatgcttactaatgataacacttcaaggtattgggaacctgagttttatgaggctatgtacacaccgcatacagtcttacaggctgttggggcttgtgttctttgcaattcacagacttcattaagatgtggtgcttgcatacgtagaccattcttatgttgtaaatgctgttacgaccatgtcatatcaacatcacataaattagtcttgtctgttaatccgtatgtttgcaatgctccaggttgtgatgtcacagatgtgactcaactttacttaggaggtatgagctattattgtaaatcacataaaccacccattagttttccattgtgtgctaatggacaagtttttggtttatataaaaatacatgtgttggtagcgataatgttactgactttaatgcaattgcaacatgtgactggacaaatgctggtgattacattttagctaacacctgtactgaaagactcaagctttttgcagcagaaacgctcaaagctactgaggagacatttaaactgtcttatggtattgctactgtacgtgaagtgctgtctgacagagaattacatctttcatgggaagttggtaaacctagaccaccacttaaccgaaattatgtctttactggttatcgtgtaactaaaaacagtaaagtacaaataggagagtacacctttgaaaaaggtgactatggtgatgctgttgtttaccgaggtacaacaacttacaaattaaatgttggtgattattttgtgctgacatcacatacagtaatgccattaagtgcacctacactagtgccacaagagcactatgttagaattactggcttatacccaacactcaatatctcagatgagttttctagcaatgttgcaaattatcaaaaggttggtatgcaaaagtattctacactccagggaccacctggtactggtaagagtcattttgctattggcctagctctctactacccttctgctcgcatagtgtatacagcttgctctcatgccgctgttgatgcactatgtgagaaggcattaaaatatttgcctatagataaatgtagtagaattatacctgcacgtgctcgtgtagagtgttttgataaattcaaagtgaattcaacattagaacagtatgtcttttgtactgtaaatgcattgcctgagacgacagcagatatagttgtctttgatgaaatttcaatggccacaaattatgatttgagtgttgtcaatgccagattacgtgctaagcactatgtgtacattggcgaccctgctcaattacctgcaccacgcacattgctaactaagggcacactagaaccagaatatttcaattcagtgtgtagacttatgaaaactataggtccagacatgttcctcggaacttgtcggcgttgtcctgctgaaattgttgacactgtgagtgctttggtttatgataataagcttaaagcacataaagacaaatcagctcaatgctttaaaatgttttataagggtgttatcacgcatgatgtttcatctgcaattaacaggccacaaataggcgtggtaagagaattccttacacgtaaccctgcttggagaaaagctgtctttatttcaccttataattcacagaatgctgtagcctcaaagattttgggactaccaactcaaactgttgattcatcacagggctcagaatatgactatgtcatattcactcaaaccactgaaacagctcactcttgtaatgtaaacagatttaatgttgctattaccagagcaaaagtaggcatactttgcataatgtctgatagagacctttatgacaagttgcaatttacaagtcttgaaattccacgtaggaatgtggcaactttacaagctgaaaatgtaacaggactctttaaagattgtagtaaggtaatcactgggttacatcctacacaggcacctacacacctcagtgttgacactaaattcaaaactgaaggtttatgtgttgacatacctggcatacctaaggacatgacctatagaagactcatctctatgatgggttttaaaatgaattatcaagttaatggttaccctaacatgtttatcacccgcgaagaagctataagacatgtacgtgcatggattggcttcgatgtcgaggggtgtcatgctactagagaagctgttggtaccaatttacctttacagctaggtttttctacaggtgttaacctagttgctgtacctacaggttatgttgatacacctaataatacagatttttccagagttagtgctaaaccaccgcctggagatcaatttaaacacctcataccacttatgtacaaaggacttccttggaatgtagtgcgtataaagattgtacaaatgttaagtgacacacttaaaaatctctctgacagagtcgtatttgtcttatgggcacatggctttgagttgacatctatgaagtattttgtgaaaataggacctgagcgcacctgttgtctatgtgatagacgtgccacatgcttttccactgcttcagacacttatgcctgttggcatcattctattggatttgattacgtctataatccgtttatgattgatgttcaacaatggggttttacaggtaacctacaaagcaaccatgatctgtattgtcaagtccatggtaatgcacatgtagctagttgtgatgcaatcatgactaggtgtctagctgtccacgagtgctttgttaagcgtgttgactggactattgaatatcctataattggtgatgaactgaagattaatgcggcttgtagaaaggttcaacacatggttgttaaagctgcattattagcagacaaattcccagttcttcacgacattggtaaccctaaagctattaagtgtgtacctcaagctgatgtagaatggaagttctatgatgcacagccttgtagtgacaaagcttataaaatagaagaattattctattcttatgccacacattctgacaaattcacagatggtgtatgcctattttggaattgcaatgtcgatagatatcctgctaattccattgtttgtagatttgacactagagtgctatctaaccttaacttgcctggttgtgatggtggcagtttgtatgtaaataaacatgcattccacacaccagcttttgataaaagtgcttttgttaatttaaaacaattaccatttttctattactctgacagtccatgtgagtctcatggaaaacaagtagtgtcagatatagattatgtaccactaaagtctgctacgtgtataacacgttgcaatttaggtggtgctgtctgtagacatcatgctaatgagtacagattgtatctcgatgcttataacatgatgatctcagctggctttagcttgtgggtttacaaacaatttgatacttataacctctggaacacttttacaagacttcagagtttagaaaatgtggcttttaatgttgtaaataagggacactttgatggacaacagggtgaagtaccagtttctatcattaataacactgtttacacaaaagttgatggtgttgatgtagaattgtttgaaaataaaacaacattacctgttaatgtagcatttgagctttgggctaagcgcaacattaaaccagtaccagaggtgaaaatactcaataatttgggtgtggacattgctgctaatactgtgatctgggactacaaaagagatgctccagcacatatatctactattggtgtttgttctatgactgacatagccaagaaaccaactgaaacgatttgtgcaccactcactgtcttttttgatggtagagttgatggtcaagtagacttatttagaaatgcccgtaatggtgttcttattacagaaggtagtgttaaaggtttacaaccatctgtaggtcccaaacaagctagtcttaatggagtcacattaattggagaagccgtaaaaacacagttcaattattataagaaagttgatggtgttgtccaacaattacctgaaacttactttactcagagtagaaatttacaagaatttaaacccaggagtcaaatggaaattgatttcttagaattagctatggatgaattcattgaacggtataaattagaaggctatgccttcgaacatatcgtttatggagattttagtcatagtcagttaggtggtttacatctactgattggactagctaaacgttttaaggaatcaccttttgaattagaagattttattcctatggacagtacagttaaaaactatttcataacagatgcgcaaacaggttcatctaagtgtgtgtgttctgttattgatttattacttgatgattttgttgaaataataaaatcccaagatttatctgtagtttctaaggttgtcaaagtgactattgactatacagaaatttcatttatgctttggtgtaaagatggccatgtagaaacattttacccaaaattacaatctagtcaagcgtggcaaccgggtgttgctatgcctaatctttacaaaatgcaaagaatgctattagaaaagtgtgaccttcaaaattatggtgatagtgcaacattacctaaaggcataatgatgaatgtcgcaaaatatactcaactgtgtcaatatttaaacacattaacattagctgtaccctataatatgagagttatacattttggtgctggttctgataaaggagttgcaccaggtacagctgttttaagacagtggttgcctacgggtacgctgcttgtcgattcagatcttaatgactttgtctctgatgcagattcaactttgattggtgattgtgcaactgtacatacagctaataaatgggatctcattattagtgatatgtacgaccctaagactaaaaatgttacaaaagaaaatgactctaaagagggttttttcacttacatttgtgggtttatacaacaaaagctagctcttggaggttccgtggctataaagataacagaacattcttggaatgctgatctttataagctcatgggacacttcgcatggtggacagcctttgttactaatgtgaatgcgtcatcatctgaagcatttttaattggatgtaattatcttggcaaaccacgcgaacaaatagatggttatgtcatgcatgcaaattacatattttggaggaatacaaatccaattcagttgtcttcctattctttatttgacatgagtaaatttccccttaaattaaggggtactgctgttatgtctttaaaagaaggtcaaatcaatgatatgattttatctcttcttagtaaaggtagacttataattagagaaaacaacagagttgttatttctagtgatgttcttgttaacaactaaacgaacaatgtttgtttttcttgttttattgccactagtctctagtcagtgtgttaatcttacaaccagaactcaattaccccctgcatacactaattctttcacacgtggtgtttattaccctgacaaagttttcagatcctcagttttacattcaactcaggacttgttcttacctttcttttccaatgttacttggttccatgctatacatgtctctgggaccaatggtactaagaggtttgataaccctgtcctaccatttaatgatggtgtttattttgcttccactgagaagtctaacataataagaggctggatttttggtactactttagattcgaagacccagtccctacttattgttaataacgctactaatgttgttattaaagtctgtgaatttcaattttgtaatgatccatttttgggtgtttattaccacaaaaacaacaaaagttggatggaaagtgagttcagagtttattctagtgcgaataattgcacttttgaatatgtctctcagccttttcttatggaccttgaaggaaaacagggtaatttcaaaaatcttagggaatttgtgtttaagaatattgatggttattttaaaatatattctaagcacacgcctattaatttagtgcgtgatctccctcagggtttttcggctttagaaccattggtagatttgccaataggtattaacatcactaggtttcaaactttacttgctttacatagaagttatttgactcctggtgattcttcttcaggttggacagctggtgctgcagcttattatgtgggttatcttcaacctaggacttttctattaaaatataatgaaaatggaaccattacagatgctgtagactgtgcacttgaccctctctcagaaacaaagtgtacgttgaaatccttcactgtagaaaaaggaatctatcaaacttctaactttagagtccaaccaacagaatctattgttagatttcctaatattacaaacttgtgcccttttggtgaagtttttaacgccaccagatttgcatctgtttatgcttggaacaggaagagaatcagcaactgtgttgctgattattctgtcctatataattccgcatcattttccacttttaagtgttatggagtgtctcctactaaattaaatgatctctgctttactaatgtctatgcagattcatttgtaattagaggtgatgaagtcagacaaatcgctccagggcaaactggaaagattgctgattataattataaattaccagatgattttacaggctgcgttatagcttggaattctaacaatcttgattctaaggttggtggtaattataattacctgtatagattgtttaggaagtctaatctcaaaccttttgagagagatatttcaactgaaatctatcaggccggtagcacaccttgtaatggtgttgaaggttttaattgttactttcctttacaatcatatggtttccaacccactaatggtgttggttaccaaccatacagagtagtagtactttcttttgaacttctacatgcaccagcaactgtttgtggacctaaaaagtctactaatttggttaaaaacaaatgtgtcaatttcaacttcaatggtttaacaggcacaggtgttcttactgagtctaacaaaaagtttctgcctttccaacaatttggcagagacattgctgacactactgatgctgtccgtgatccacagacacttgagattcttgacattacaccatgttcttttggtggtgtcagtgttataacaccaggaacaaatacttctaaccaggttgctgttctttatcaggatgttaactgcacagaagtccctgttgctattcatgcagatcaacttactcctacttggcgtgtttattctacaggttctaatgtttttcaaacacgtgcaggctgtttaataggggctgaacatgtcaacaactcatatgagtgtgacatacccattggtgcaggtatatgcgctagttatcagactcagactaattctcctcggcgggcacgtagtgtagctagtcaatccatcattgcctacactatgtcacttggtgcagaaaattcagttgcttactctaataactctattgccatacccacaaattttactattagtgttaccacagaaattctaccagtgtctatgaccaagacatcagtagattgtacaatgtacatttgtggtgattcaactgaatgcagcaatcttttgttgcaatatggcagtttttgtacacaattaaaccgtgctttaactggaatagctgttgaacaagacaaaaacacccaagaagtttttgcacaagtcaaacaaatttacaaaacaccaccaattaaagattttggtggttttaatttttcacaaatattaccagatccatcaaaaccaagcaagaggtcatttattgaagatctacttttcaacaaagtgacacttgcagatgctggcttcatcaaacaatatggtgattgccttggtgatattgctgctagagacctcatttgtgcacaaaagtttaacggccttactgttttgccacctttgctcacagatgaaatgattgctcaatacacttctgcactgttagcgggtacaatcacttctggttggacctttggtgcaggtgctgcattacaaataccatttgctatgcaaatggcttataggtttaatggtattggagttacacagaatgttctctatgagaaccaaaaattgattgccaaccaatttaatagtgctattggcaaaattcaagactcactttcttccacagcaagtgcacttggaaaacttcaagatgtggtcaaccaaaatgcacaagctttaaacacgcttgttaaacaacttagctccaattttggtgcaatttcaagtgttttaaatgatatcctttcacgtcttgacaaagttgaggctgaagtgcaaattgataggttgatcacaggcagacttcaaagtttgcagacatatgtgactcaacaattaattagagctgcagaaatcagagcttctgctaatcttgctgctactaaaatgtcagagtgtgtacttggacaatcaaaaagagttgatttttgtggaaagggctatcatcttatgtccttccctcagtcagcacctcatggtgtagtcttcttgcatgtgacttatgtccctgcacaagaaaagaacttcacaactgctcctgccatttgtcatgatggaaaagcacactttcctcgtgaaggtgtctttgtttcaaatggcacacactggtttgtaacacaaaggaatttttatgaaccacaaatcattactacagacaacacatttgtgtctggtaactgtgatgttgtaataggaattgtcaacaacacagtttatgatcctttgcaacctgaattagactcattcaaggaggagttagataaatattttaagaatcatacatcaccagatgttgatttaggtgacatctctggcattaatgcttcagttgtaaacattcaaaaagaaattgaccgcctcaatgaggttgccaagaatttaaatgaatctctcatcgatctccaagaacttggaaagtatgagcagtatataaaatggccatggtacatttggctaggttttatagctggcttgattgccatagtaatggtgacaattatgctttgctgtatgaccagttgctgtagttgtctcaagggctgttgttcttgtggatcctgctgcaaatttgatgaagacgactctgagccagtgctcaaaggagtcaaattacattacacataaacgaacttatggatttgtttatgagaatcttcacaattggaactgtaactttgaagcaaggtgaaatcaaggatgctactccttcagattttgttcgcgctactgcaacgataccgatacaagcctcactccctttcggatggcttattgttggcgttgcacttcttgctgtttttcagagcgcttccaaaatcataaccctcaaaaagagatggcaactagcactctccaagggtgttcactttgtttgcaacttgctgttgttgtttgtaacagtttactcacaccttttgctcgttgctgctggccttgaagccccttttctctatctttatgctttagtctacttcttgcagagtataaactttgtaagaataataatgaggctttggctttgctggaaatgccgttccaaaaacccattactttatgatgccaactattttctttgctggcatactaattgttacgactattgtataccttacaatagtgtaacttcttcaattgtcattacttcaggtgatggcacaacaagtcctatttctgaacatgactaccagattggtggttatactgaaaaatgggaatctggagtaaaagactgtgttgtattacacagttacttcacttcagactattaccagctgtactcaactcaattgagtacagacactggtgttgaacatgttaccttcttcatctacaataaaattgttgatgagcctgaagaacatgtccaaattcacacaatcgacggttcatccggagttgttaatccagtaatggaaccaatttatgatgaaccgacgacgactactagcgtgcctttgtaagcacaagctgatgagtacgaacttatgtactcattcgtttcggaagagacaggtacgttaatagttaatagcgtacttctttttcttgctttcgtggtattcttgctagttacactagccatccttactgcgcttcgattgtgtgcgtactgctgcaatattgttaacgtgagtcttgtaaaaccttctttttacgtttactctcgtgttaaaaatctgaattcttctagagttcctgatcttctggtctaaacgaactaaatattatattagtttttctgtttggaactttaattttagccatggcagattccaacggtactattaccgttgaagagcttaaaaagctccttgaacaatggaacctagtaataggtttcctattccttacatggatttgtcttctacaatttgcctatgccaacaggaataggtttttgtatataattaagttaattttcctctggctgttatggccagtaactttagcttgttttgtgcttgctgctgtttacagaataaattggatcaccggtggaattgctatcgcaatggcttgtcttgtaggcttgatgtggctcagctacttcattgcttctttcagactgtttgcgcgtacgcgttccatgtggtcattcaatccagaaactaacattcttctcaacgtgccactccatggcactattctgaccagaccgcttctagaaagtgaactcgtaatcggagctgtgatccttcgtggacatcttcgtattgctggacaccatctaggacgctgtgacatcaaggacctgcctaaagaaatcactgttgctacatcacgaacgctttcttattacaaattgggagcttcgcagcgtgtagcaggtgactcaggttttgctgcatacagtcgctacaggattggcaactataaattaaacacagaccattccagtagcagtgacaatattgctttgcttgtacagtaagtgacaacagatgtttcatctcgttgactttcaggttactatagcagagatattactaattattatgaggacttttaaagtttccatttggaatcttgattacatcataaacctcataattaaaaatttatctaagtcactaactgagaataaatattctcaattagatgaagagcaaccaatggagattgattaaacgaacatgaaaattattcttttcttggcactgataacactcgctacttgtgagctttatcactaccaagagtgtgttagaggtacaacagtacttttaaaagaaccttgctcttctggaacatacgagggcaattcaccatttcatcctctagctgataacaaatttgcactgacttgctttagcactcaatttgcttttgcttgtcctgacggcgtaaaacacgtctatcagttacgtgccagatcagtttcacctaaactgttcatcagacaagaggaagttcaagaactttactctccaatttttcttattgttgcggcaatagtgtttataacactttgcttcacactcaaaagaaagacagaatgattgaactttcattaattgacttctatttgtgctttttagcctttctgctattccttgttttaattatgcttattatcttttggttctcacttgaactgcaagatcataatgaaacttgtcacgcctaaacgaacatgaaatttcttgttttcttaggaatcatcacaactgtagctgcatttcaccaagaatgtagtttacagtcatgtactcaacatcaaccatatgtagttgatgacccgtgtcctattcacttctattctaaatggtatattagagtaggagctagaaaatcagcacctttaattgaattgtgcgtggatgaggctggttctaaatcacccattcagtacatcgatatcggtaattatacagtttcctgtttaccttttacaattaattgccaggaacctaaattgggtagtcttgtagtgcgttgttcgttctatgaagactttttagagtatcatgacgttcgtgttgttttagatttcatctaaacgaacaaactaaaatgtctgataatggaccccaaaatcagcgaaatgcaccccgcattacgtttggtggaccctcagattcaactggcagtaaccagaatggagaacgcagtggggcgcgatcaaaacaacgtcggccccaaggtttacccaataatactgcgtcttggttcaccgctctcactcaacatggcaaggaagaccttaaattccctcgaggacaaggcgttccaattaacaccaatagcagtccagatgaccaaattggctactaccgaagagctaccagacgaattcgtggtggtgacggtaaaatgaaagatctcagtccaagatggtatttctactacctaggaactgggccagaagctggacttccctatggtgctaacaaagacggcatcatatgggttgcaactgagggagccttgaatacaccaaaagatcacattggcacccgcaatcctgctaacaatgctgcaatcgtgctacaacttcctcaaggaacaacattgccaaaaggcttctacgcagaagggagcagaggcggcagtcaagcctcttctcgttcctcatcacgtagtcgcaacagttcaagaaattcaactccaggcagcagtaggggaacttctcctgctagaatggctggcaatggcggtgatgctgctcttgctttgctgctgcttgacagattgaaccagcttgagagcaaaatgtctggtaaaggccaacaacaacaaggccaaactgtcactaagaaatctgctgctgaggcttctaagaagcctcggcaaaaacgtactgccactaaagcatacaatgtaacacaagctttcggcagacgtggtccagaacaaacccaaggaaattttggggaccaggaactaatcagacaaggaactgattacaaacattggccgcaaattgcacaatttgcccccagcgcttcagcgttcttcggaatgtcgcgcattggcatggaagtcacaccttcgggaacgtggttgacctacacaggtgccatcaaattggatgacaaagatccaaatttcaaagatcaagtcattttgctgaataagcatattgacgcatacaaaacattcccaccaacagagcctaaaaaggacaaaaagaagaaggctgatgaaactcaagccttaccgcagagacagaagaaacagcaaactgtgactcttcttcctgctgcagatttggatgatttctccaaacaattgcaacaatccatgagcagtgctgactcaactcaggcctaaactcatgcagaccacacaaggcagatgggctatataaacgttttcgcttttccgtttacgatatatagtctactcttgtgcagaatgaattctcgtaactacatagcacaagtagatgtagttaactttaatctcacatagcaatctttaatcagtgtgtaacattagggaggacttgaaagagccaccacattttcaccgaggccacgcggagtacgatcgagtgtacagtgaacaatgctagggagagctgcctatatggaagagccctaatgtgtaaaattaattttagtagtgctatccccatgtgattttaatagcttcttaggagaatgacaaaaaaaaaaaaaaaaaaaaaaaaaaaaaaaaa

SEQ ID NO: 112 - DNA, 1999 bp, Artificial Sequence
  Synthetic sequence
tcttaatggagtcacattaattggagaagccgtaaaaacacagttcaattattataagaaagttgatggtgttgtccaacaattacctgaaacttactttactcagagtagaaatttacaagaatttaaacccaggagtcaaatggaaattgatttcttagaattagctatggatgaattcattgaacggtataaattagaaggctatgccttcgaacatatcgtttatggagattttagtcatagtcagttaggtggtttacatctactgattggactagctaaacgttttaaggaatcaccttttgaattagaagattttattcctatggacagtacagttaaaaactatttcataacagatgcgcaaacaggttcatctaagtgtgtgtgttctgttattgatttattacttgatgattttgttgaaataataaaatcccaagatttatctgtagtttctaaggttgtcaaagtgactattgactatacagaaatttcatttatgctttggtgtaaagatggccatgtagaaacattttacccaaaattacaatctagtcaagcgtggcaaccgggtgttgctatgcctaatctttacaaaatgcaaagaatgctattagaaaagtgtgaccttcaaaattatggtgatagtgcaacattacctaaaggcataatgatgaatgtcgcaaaatatactcaactgtgtcaatatttaaacacattaacattagctgtaccctataatatgagagttatacattttggtgctggttctgataaaggagttgcaccaggtacagctgttttaagacagtggttgcctacgggtacgctgcttgtcgattcagatcttaatgactttgtctctgatgcagattcaactttgattggtgattgtgcaactgtacatacagctaataaatgggatctcattattagtgatatgtacgaccctaagactaaaaatgttacaaaagaaaatgactctaaagagggttttttcacttacatttgtgggtttatacaacaaaagctagctcttggaggttccgtggctataaagataacagaacattcttggaatgctgatctttataagctcatgggacacttcgcatggtggacagcctttgttactaatgtgaatgcgtcatcatctgaagcatttttaattggatgtaattatcttggcaaaccacgcgaacaaatagatggttatgtcatgcatgcaaattacatattttggaggaatacaaatccaattcagttgtcttcctattctttatttgacatgagtaaatttccccttaaattaaggggtactgctgttatgtctttaaaagaaggtcaaatcaatgatatgattttatctcttcttagtaaaggtagacttataattagagaaaacaacagagttgttatttctagtgatgttcttgttaacaactaaacgaacaatgtttgtttttcttgttttattgccactagtctctagtcagtgtgttaatcttacaaccagaactcaattaccccctgcatacactaattctttcacacgtggtgtttattaccctgacaaagttttcagatcctcagttttacattcaactcaggacttgttcttacctttcttttccaatgttacttggttccatgctatacatgtctctgggaccaatggtactaagaggtttgataaccctgtcctaccatttaatgatggtgtttattttgcttccactgagaagtctaacataataagaggctggatttttggtactactttagattcgaagacccagtccctacttattgttaataacgctactaatgttgttattaaagtctgtgaatttcaattttgtaatgatccatttttgggtgtttattaccacaaaaacaacaaaagttggatggaaagtgagttcagagtttattctagtgcgaataattgcacttttgaatatgtctctcagccttttcttatggaccttga

SEQ ID NO: 113 - DNA, 15602 bp, Artificial Sequence
  Synthetic sequence
attaaaggtttataccttcccaggtaacaaaccaaccaactttcgatctcttgtagatctgttctctaaacaaactttaatgttttattctctacagtgttcccacctacaagttttggaccactagtgagaaaaatatttgttgatggtgttccatttgtagtttcaactggataccacttcagagagctaggtgttgtacataatcaggatgtaaacttacatagctctagacttagttttaaggaattacttgtgtatgctgctgaccctgctatgcacgctgcttctggtaatctattactagataaacgcactacgtgcttttcagtagctgcacttactaacaatgttgcttttcaaactgtcaaacccggtaattttaacaaagacttctatgactttgctgtgtctaagggtttctttaaggaaggaagttctgttgaattaaaacacttcttctttgctcaggatggtaatgctgctatcagcgattatgactactatcgttataatctaccaacaatgtgtgatatcagacaactactatttgtagttgaagttgttgataagtactttgattgttacgatggtggctgtattaatgctaaccaagtcatcgtcaacaacctagacaaatcagctggttttccatttaataaatggggtaaggctagactttattatgattcaatgagttatgaggatcaagatgcacttttcgcatatacaaaacgtaatgtcatccctactataactcaaatgaatcttaagtatgccattagtgcaaagaatagagctcgcaccgtagctggtgtctctatctgtagtactatgaccaatagacagtttcatcaaaaattattgaaatcaatagccgccactagaggagctactgtagtaattggaacaagcaaattctatggtggttggcacaacatgttaaaaactgtttatagtgatgtagaaaaccctcaccttatgggttgggattatcctaaatgtgatagagccatgcctaacatgcttagaattatggcctcacttgttcttgctcgcaaacatacaacgtgttgtagcttgtcacaccgtttctatagattagctaatgagtgtgctcaagtattgagtgaaatggtcatgtgtggcggttcactatatgttaaaccaggtggaacctcatcaggagatgccacaactgcttatgctaatagtgtttttaacatttgtcaagctgtcacggccaatgttaatgcacttttatctactgatggtaacaaaattgccgataagtatgtccgcaatttacaacacagactttatgagtgtctctatagaaatagagatgttgacacagactttgtgaatgagttttacgcatatttgcgtaaacatttctcaatgatgatactctctgacgatgctgttgtgtgtttcaatagcacttatgcatctcaaggtctagtggctagcataaagaactttaagtcagttctttattatcaaaacaatgtttttatgtctgaagcaaaatgttggactgagactgaccttactaaaggacctcatgaattttgctctcaacatacaatgctagttaaacagggtgatgattatgtgtaccttccttacccagatccatcaagaatcctaggggccggctgttttgtagatgatatcgtaaaaacagatggtacacttatgattgaacggttcgtgtctttagctatagatgcttacccacttactaaacatcctaatcaggagtatgctgatgtctttcatttgtacttacaatacataagaaagctacatgatgagttaacaggacacatgttagacatgtattctgttatgcttactaatgataacacttcaaggtattgggaacctgagttttatgaggctatgtacacaccgcatacagtcttacaggctgttggggcttgtgttctttgcaattcacagacttcattaagatgtggtgcttgcatacgtagaccattcttatgttgtaaatgctgttacgaccatgtcatatcaacatcacataaattagtcttgtctgttaatccgtatgtttgcaatgctccaggttgtgatgtcacagatgtgactcaactttacttaggaggtatgagctattattgtaaatcacataaaccacccattagttttccattgtgtgctaatggacaagtttttggtttatataaaaatacatgtgttggtagcgataatgttactgactttaatgcaattgcaacatgtgactggacaaatgctggtgattacattttagctaacacctgtactgaaagactcaagctttttgcagcagaaacgctcaaagctactgaggagacatttaaactgtcttatggtattgctactgtacgtgaagtgctgtctgacagagaattacatctttcatgggaagttggtaaacctagaccaccacttaaccgaaattatgtctttactggttatcgtgtaactaaaaacagtaaagtacaaataggagagtacacctttgaaaaaggtgactatggtgatgctgttgtttaccgaggtacaacaacttacaaattaaatgttggtgattattttgtgctgacatcacatacagtaatgccattaagtgcacctacactagtgccacaagagcactatgttagaattactggcttatacccaacactcaatatctcagatgagttttctagcaatgttgcaaattatcaaaaggttggtatgcaaaagtattctacactccagggaccacctggtactggtaagagtcattttgctattggcctagctctctactacccttctgctcgcatagtgtatacagcttgctctcatgccgctgttgatgcactatgtgagaaggcattaaaatatttgcctatagataaatgtagtagaattatacctgcacgtgctcgtgtagagtgttttgataaattcaaagtgaattcaacattagaacagtatgtcttttgtactgtaaatgcattgcctgagacgacagcagatatagttgtctttgatgaaatttcaatggccacaaattatgatttgagtgttgtcaatgccagattacgtgctaagcactatgtgtacattggcgaccctgctcaattacctgcaccacgcacattgctaactaagggcacactagaaccagaatatttcaattcagtgtgtagacttatgaaaactataggtccagacatgttcctcggaacttgtcggcgttgtcctgctgaaattgttgacactgtgagtgctttggtttatgataataagcttaaagcacataaagacaaatcagctcaatgctttaaaatgttttataagggtgttatcacgcatgatgtttcatctgcaattaacaggccacaaataggcgtggtaagagaattccttacacgtaaccctgcttggagaaaagctgtctttatttcaccttataattcacagaatgctgtagcctcaaagattttgggactaccaactcaaactgttgattcatcacagggctcagaatatgactatgtcatattcactcaaaccactgaaacagctcactcttgtaatgtaaacagatttaatgttgctattaccagagcaaaagtaggcatactttgcataatgtctgatagagacctttatgacaagttgcaatttacaagtcttgaaattccacgtaggaatgtggcaactttacaagctgaaaatgtaacaggactctttaaagattgtagtaaggtaatcactgggttacatcctacacaggcacctacacacctcagtgttgacactaaattcaaaactgaaggtttatgtgttgacatacctggcatacctaaggacatgacctatagaagactcatctctatgatgggttttaaaatgaattatcaagttaatggttaccctaacatgtttatcacccgcgaagaagctataagacatgtacgtgcatggattggcttcgatgtcgaggggtgtcatgctactagagaagctgttggtaccaatttacctttacagctaggtttttctacaggtgttaacctagttgctgtacctacaggttatgttgatacacctaataatacagatttttccagagttagtgctaaaccaccgcctggagatcaatttaaacacctcataccacttatgtacaaaggacttccttggaatgtagtgcgtataaagattgtacaaatgttaagtgacacacttaaaaatctctctgacagagtcgtatttgtcttatgggcacatggctttgagttgacatctatgaagtattttgtgaaaataggacctgagcgcacctgttgtctatgtgatagacgtgccacatgcttttccactgcttcagacacttatgcctgttggcatcattctattggatttgattacgtctataatccgtttatgattgatgttcaacaatggggttttacaggtaacctacaaagcaaccatgatctgtattgtcaagtccatggtaatgcacatgtagctagttgtgatgcaatcatgactaggtgtctagctgtccacgagtgctttgttaagcgtgttgactggactattgaatatcctataattggtgatgaactgaagattaatgcggcttgtagaaaggttcaacacatggttgttaaagctgcattattagcagacaaattcccagttcttcacgacattggtaaccctaaagctattaagtgtgtacctcaagctgatgtagaatggaagttctatgatgcacagccttgtagtgacaaagcttataaaatagaagaattattctattcttatgccacacattctgacaaattcacagatggtgtatgcctattttggaattgcaatgtcgatagatatcctgctaattccattgtttgtagatttgacactagagtgctatctaaccttaacttgcctggttgtgatggtggcagtttgtatgtaaataaacatgcattccacacaccagcttttgataaaagtgcttttgttaatttaaaacaattaccatttttctattactctgacagtccatgtgagtctcatggaaaacaagtagtgtcagatatagattatgtaccactaaagtctgctacgtgtataacacgttgcaatttaggtggtgctgtctgtagacatcatgctaatgagtacagattgtatctcgatgcttataacatgatgatctcagctggctttagcttgtgggtttacaaacaatttgatacttataacctctggaacacttttacaagacttcagagtttagaaaatgtggcttttaatgttgtaaataagggacactttgatggacaacagggtgaagtaccagtttctatcattaataacactgtttacacaaaagttgatggtgttgatgtagaattgtttgaaaataaaacaacattacctgttaatgtagcatttgagctttgggctaagcgcaacattaaaccagtaccagaggtgaaaatactcaataatttgggtgtggacattgctgctaatactgtgatctgggactacaaaagagatgctccagcacatatatctactattggtgtttgttctatgactgacatagccaagaaaccaactgaaacgatttgtgcaccactcactgtcttttttgatggtagagttgatggtcaagtagacttatttagaaatgcccgtaatggtgttcttattacagaaggtagtgttaaaggtttacaaccatctgtaggtcccaaacaagctagtcttaatggagtcacattaattggagaagccgtaaaaacacagttcaattattataagaaagttgatggtgttgtccaacaattacctgaaacttactttactcagagtagaaatttacaagaatttaaacccaggagtcaaatggaaattgatttcttagaattagctatggatgaattcattgaacggtataaattagaaggctatgccttcgaacatatcgtttatggagattttagtcatagtcagttaggtggtttacatctactgattggactagctaaacgttttaaggaatcaccttttgaattagaagattttattcctatggacagtacagttaaaaactatttcataacagatgcgcaaacaggttcatctaagtgtgtgtgttctgttattgatttattacttgatgattttgttgaaataataaaatcccaagatttatctgtagtttctaaggttgtcaaagtgactattgactatacagaaatttcatttatgctttggtgtaaagatggccatgtagaaacattttacccaaaattacaatctagtcaagcgtggcaaccgggtgttgctatgcctaatctttacaaaatgcaaagaatgctattagaaaagtgtgaccttcaaaattatggtgatagtgcaacattacctaaaggcataatgatgaatgtcgcaaaatatactcaactgtgtcaatatttaaacacattaacattagctgtaccctataatatgagagttatacattttggtgctggttctgataaaggagttgcaccaggtacagctgttttaagacagtggttgcctacgggtacgctgcttgtcgattcagatcttaatgactttgtctctgatgcagattcaactttgattggtgattgtgcaactgtacatacagctaataaatgggatctcattattagtgatatgtacgaccctaagactaaaaatgttacaaaagaaaatgactctaaagagggttttttcacttacatttgtgggtttatacaacaaaagctagctcttggaggttccgtggctataaagataacagaacattcttggaatgctgatctttataagctcatgggacacttcgcatggtggacagcctttgttactaatgtgaatgcgtcatcatctgaagcatttttaattggatgtaattatcttggcaaaccacgcgaacaaatagatggttatgtcatgcatgcaaattacatattttggaggaatacaaatccaattcagttgtcttcctattctttatttgacatgagtaaatttccccttaaattaaggggtactgctgttatgtctttaaaagaaggtcaaatcaatgatatgattttatctcttcttagtaaaggtagacttataattagagaaaacaacagagttgttatttctagtgatgttcttgttaacaactaaacgaacaatgtttgtttttcttgttttattgccactagtctctagtcagtgtgttaatcttacaaccagaactcaattaccccctgcatacactaattctttcacacgtggtgtttattaccctgacaaagttttcagatcctcagttttacattcaactcaggacttgttcttacctttcttttccaatgttacttggttccatgctatacatgtctctgggaccaatggtactaagaggtttgataaccctgtcctaccatttaatgatggtgtttattttgcttccactgagaagtctaacataataagaggctggatttttggtactactttagattcgaagacccagtccctacttattgttaataacgctactaatgttgttattaaagtctgtgaatttcaattttgtaatgatccatttttgggtgtttattaccacaaaaacaacaaaagttggatggaaagtgagttcagagtttattctagtgcgaataattgcacttttgaatatgtctctcagccttttcttatggaccttgaaggaaaacagggtaatttcaaaaatcttagggaatttgtgtttaagaatattgatggttattttaaaatatattctaagcacacgcctattaatttagtgcgtgatctccctcagggtttttcggctttagaaccattggtagatttgccaataggtattaacatcactaggtttcaaactttacttgctttacatagaagttatttgactcctggtgattcttcttcaggttggacagctggtgctgcagcttattatgtgggttatcttcaacctaggacttttctattaaaatataatgaaaatggaaccattacagatgctgtagactgtgcacttgaccctctctcagaaacaaagtgtacgttgaaatccttcactgtagaaaaaggaatctatcaaacttctaactttagagtccaaccaacagaatctattgttagatttcctaatattacaaacttgtgcccttttggtgaagtttttaacgccaccagatttgcatctgtttatgcttggaacaggaagagaatcagcaactgtgttgctgattattctgtcctatataattccgcatcattttccacttttaagtgttatggagtgtctcctactaaattaaatgatctctgctttactaatgtctatgcagattcatttgtaattagaggtgatgaagtcagacaaatcgctccagggcaaactggaaagattgctgattataattataaattaccagatgattttacaggctgcgttatagcttggaattctaacaatcttgattctaaggttggtggtaattataattacctgtatagattgtttaggaagtctaatctcaaaccttttgagagagatatttcaactgaaatctatcaggccggtagcacaccttgtaatggtgttgaaggttttaattgttactttcctttacaatcatatggtttccaacccactaatggtgttggttaccaaccatacagagtagtagtactttcttttgaacttctacatgcaccagcaactgtttgtggacctaaaaagtctactaatttggttaaaaacaaatgtgtcaatttcaacttcaatggtttaacaggcacaggtgttcttactgagtctaacaaaaagtttctgcctttccaacaatttggcagagacattgctgacactactgatgctgtccgtgatccacagacacttgagattcttgacattacaccatgttcttttggtggtgtcagtgttataacaccaggaacaaatacttctaaccaggttgctgttctttatcaggatgttaactgcacagaagtccctgttgctattcatgcagatcaacttactcctacttggcgtgtttattctacaggttctaatgtttttcaaacacgtgcaggctgtttaataggggctgaacatgtcaacaactcatatgagtgtgacatacccattggtgcaggtatatgcgctagttatcagactcagactaattctcctcggcgggcacgtagtgtagctagtcaatccatcattgcctacactatgtcacttggtgcagaaaattcagttgcttactctaataactctattgccatacccacaaattttactattagtgttaccacagaaattctaccagtgtctatgaccaagacatcagtagattgtacaatgtacatttgtggtgattcaactgaatgcagcaatcttttgttgcaatatggcagtttttgtacacaattaaaccgtgctttaactggaatagctgttgaacaagacaaaaacacccaagaagtttttgcacaagtcaaacaaatttacaaaacaccaccaattaaagattttggtggttttaatttttcacaaatattaccagatccatcaaaaccaagcaagaggtcatttattgaagatctacttttcaacaaagtgacacttgcagatgctggcttcatcaaacaatatggtgattgccttggtgatattgctgctagagacctcatttgtgcacaaaagtttaacggccttactgttttgccacctttgctcacagatgaaatgattgctcaatacacttctgcactgttagcgggtacaatcacttctggttggacctttggtgcaggtgctgcattacaaataccatttgctatgcaaatggcttataggtttaatggtattggagttacacagaatgttctctatgagaaccaaaaattgattgccaaccaatttaatagtgctattggcaaaattcaagactcactttcttccacagcaagtgcacttggaaaacttcaagatgtggtcaaccaaaatgcacaagctttaaacacgcttgttaaacaacttagctccaattttggtgcaatttcaagtgttttaaatgatatcctttcacgtcttgacaaagttgaggctgaagtgcaaattgataggttgatcacaggcagacttcaaagtttgcagacatatgtgactcaacaattaattagagctgcagaaatcagagcttctgctaatcttgctgctactaaaatgtcagagtgtgtacttggacaatcaaaaagagttgatttttgtggaaagggctatcatcttatgtccttccctcagtcagcacctcatggtgtagtcttcttgcatgtgacttatgtccctgcacaagaaaagaacttcacaactgctcctgccatttgtcatgatggaaaagcacactttcctcgtgaaggtgtctttgtttcaaatggcacacactggtttgtaacacaaaggaatttttatgaaccacaaatcattactacagacaacacatttgtgtctggtaactgtgatgttgtaataggaattgtcaacaacacagtttatgatcctttgcaacctgaattagactcattcaaggaggagttagataaatattttaagaatcatacatcaccagatgttgatttaggtgacatctctggcattaatgcttcagttgtaaacattcaaaaagaaattgaccgcctcaatgaggttgccaagaatttaaatgaatctctcatcgatctccaagaacttggaaagtatgagcagtatataaaatggccatggtacatttggctaggttttatagctggcttgattgccatagtaatggtgacaattatgctttgctgtatgaccagttgctgtagttgtctcaagggctgttgttcttgtggatcctgctgcaaatttgatgaagacgactctgagccagtgctcaaaggagtcaaattacattacacataaacgaacttatggatttgtttatgagaatcttcacaattggaactgtaactttgaagcaaggtgaaatcaaggatgctactccttcagattttgttcgcgctactgcaacgataccgatacaagcctcactccctttcggatggcttattgttggcgttgcacttcttgctgtttttcagagcgcttccaaaatcataaccctcaaaaagagatggcaactagcactctccaagggtgttcactttgtttgcaacttgctgttgttgtttgtaacagtttactcacaccttttgctcgttgctgctggccttgaagccccttttctctatctttatgctttagtctacttcttgcagagtataaactttgtaagaataataatgaggctttggctttgctggaaatgccgttccaaaaacccattactttatgatgccaactattttctttgctggcatactaattgttacgactattgtataccttacaatagtgtaacttcttcaattgtcattacttcaggtgatggcacaacaagtcctatttctgaacatgactaccagattggtggttatactgaaaaatgggaatctggagtaaaagactgtgttgtattacacagttacttcacttcagactattaccagctgtactcaactcaattgagtacagacactggtgttgaacatgttaccttcttcatctacaataaaattgttgatgagcctgaagaacatgtccaaattcacacaatcgacggttcatccggagttgttaatccagtaatggaaccaatttatgatgaaccgacgacgactactagcgtgcctttgtaagcacaagctgatgagtacgaacttatgtactcattcgtttcggaagagacaggtacgttaatagttaatagcgtacttctttttcttgctttcgtggtattcttgctagttacactagccatccttactgcgcttcgattgtgtgcgtactgctgcaatattgttaacgtgagtcttgtaaaaccttctttttacgtttactctcgtgttaaaaatctgaattcttctagagttcctgatcttctggtctaaacgaactaaatattatattagtttttctgtttggaactttaattttagccatggcagattccaacggtactattaccgttgaagagcttaaaaagctccttgaacaatggaacctagtaataggtttcctattccttacatggatttgtcttctacaatttgcctatgccaacaggaataggtttttgtatataattaagttaattttcctctggctgttatggccagtaactttagcttgttttgtgcttgctgctgtttacagaataaattggatcaccggtggaattgctatcgcaatggcttgtcttgtaggcttgatgtggctcagctacttcattgcttctttcagactgtttgcgcgtacgcgttccatgtggtcattcaatccagaaactaacattcttctcaacgtgccactccatggcactattctgaccagaccgcttctagaaagtgaactcgtaatcggagctgtgatccttcgtggacatcttcgtattgctggacaccatctaggacgctgtgacatcaaggacctgcctaaagaaatcactgttgctacatcacgaacgctttcttattacaaattgggagcttcgcagcgtgtagcaggtgactcaggttttgctgcatacagtcgctacaggattggcaactataaattaaacacagaccattccagtagcagtgacaatattgctttgcttgtacagtaagtgacaacagatgtttcatctcgttgactttcaggttactatagcagagatattactaattattatgaggacttttaaagtttccatttggaatcttgattacatcataaacctcataattaaaaatttatctaagtcactaactgagaataaatattctcaattagatgaagagcaaccaatggagattgattaaacgaacatgaaaattattcttttcttggcactgataacactcgctacttgtgagctttatcactaccaagagtgtgttagaggtacaacagtacttttaaaagaaccttgctcttctggaacatacgagggcaattcaccatttcatcctctagctgataacaaatttgcactgacttgctttagcactcaatttgcttttgcttgtcctgacggcgtaaaacacgtctatcagttacgtgccagatcagtttcacctaaactgttcatcagacaagaggaagttcaagaactttactctccaatttttcttattgttgcggcaatagtgtttataacactttgcttcacactcaaaagaaagacagaatgattgaactttcattaattgacttctatttgtgctttttagcctttctgctattccttgttttaattatgcttattatcttttggttctcacttgaactgcaagatcataatgaaacttgtcacgcctaaacgaacatgaaatttcttgttttcttaggaatcatcacaactgtagctgcatttcaccaagaatgtagtttacagtcatgtactcaacatcaaccatatgtagttgatgacccgtgtcctattcacttctattctaaatggtatattagagtaggagctagaaaatcagcacctttaattgaattgtgcgtggatgaggctggttctaaatcacccattcagtacatcgatatcggtaattatacagtttcctgtttaccttttacaattaattgccaggaacctaaattgggtagtcttgtagtgcgttgttcgttctatgaagactttttagagtatcatgacgttcgtgttgttttagatttcatctaaacgaacaaactaaaatgtctgataatggaccccaaaatcagcgaaatgcaccccgcattacgtttggtggaccctcagattcaactggcagtaaccagaatggagaacgcagtggggcgcgatcaaaacaacgtcggccccaaggtttacccaataatactgcgtcttggttcaccgctctcactcaacatggcaaggaagaccttaaattccctcgaggacaaggcgttccaattaacaccaatagcagtccagatgaccaaattggctactaccgaagagctaccagacgaattcgtggtggtgacggtaaaatgaaagatctcagtccaagatggtatttctactacctaggaactgggccagaagctggacttccctatggtgctaacaaagacggcatcatatgggttgcaactgagggagccttgaatacaccaaaagatcacattggcacccgcaatcctgctaacaatgctgcaatcgtgctacaacttcctcaaggaacaacattgccaaaaggcttctacgcagaagggagcagaggcggcagtcaagcctcttctcgttcctcatcacgtagtcgcaacagttcaagaaattcaactccaggcagcagtaggggaacttctcctgctagaatggctggcaatggcggtgatgctgctcttgctttgctgctgcttgacagattgaaccagcttgagagcaaaatgtctggtaaaggccaacaacaacaaggccaaactgtcactaagaaatctgctgctgaggcttctaagaagcctcggcaaaaacgtactgccactaaagcatacaatgtaacacaagctttcggcagacgtggtccagaacaaacccaaggaaattttggggaccaggaactaatcagacaaggaactgattacaaacattggccgcaaattgcacaatttgcccccagcgcttcagcgttcttcggaatgtcgcgcattggcatggaagtcacaccttcgggaacgtggttgacctacacaggtgccatcaaattggatgacaaagatccaaatttcaaagatcaagtcattttgctgaataagcatattgacgcatacaaaacattcccaccaacagagcctaaaaaggacaaaaagaagaaggctgatgaaactcaagccttaccgcagagacagaagaaacagcaaactgtgactcttcttcctgctgcagatttggatgatttctccaaacaattgcaacaatccatgagcagtgctgactcaactcaggcctaaactcatgcagaccacacaaggcagatgggctatataaacgttttcgcttttccgtttacgatatatagtctactcttgtgcagaatgaattctcgtaactacatagcacaagtagatgtagttaactttaatctcacatagcaatctttaatcagtgtgtaacattagggaggacttgaaagagccaccacattttcaccgaggccacgcggagtacgatcgagtgtacagtgaacaatgctagggagagctgcctatatggaagagccctaatgtgtaaaattaattttagtagtgctatccccatgtgattttaatagcttcttaggagaatgacaaaaaaaaaaaaaaaaaaaaaaaaaaaaaaaaa

1. A method for producing a defective interfering viral genome (DVG), the method comprising:
providing a first set of at least three replicate in vitro cell cultures, comprising a solid support and cells infected with a reference infectious virus at a high multiplicity of infection (MOI);
providing a second set of at least three replicate in vitro cell cultures, comprising a solid support and cells infected with the reference infectious virus at a low multiplicity of infection (MOI);
culturing the first and second sets of replicate in vitro cell cultures for at least 5 passages under mutagenic conditions;
collecting a plurality of DVG candidates from the medium of the first and second sets of in vitro replicate cell cultures;
deep sequencing the collected DVG candidates; and
selecting a DVG from the plurality of DVG candidates.

2. The method of claim 1, further comprising:
providing a third set of at least three replicate in vitro cell cultures, comprising a solid support and cells infected with a reference infectious virus at a high multiplicity of infection (MOI); and/or
providing a fourth set of at least three replicate in vitro cell cultures, comprising a solid support and cells infected with the reference infectious virus at a low multiplicity of infection (MOI); and
culturing the third and/or fourth sets of replicate in vitro cell cultures for at least 5 passages under non-mutagenic conditions.

3. The method of claim 1 or claim 2, wherein selecting a DVG from the plurality of DVG candidates comprises:
comparing the sequences of the DVG candidates with the sequence of the genome of the reference infectious virus;
identifying at least one DVG candidate having a genome comprising at least one splicing event where the splicing event is a deletion or a rearrangement;
determining the relative frequency of at least one DVG candidate having a genome with at least one splicing event among the population of sequenced DVG candidate genomes; and,
selecting at least one DVG for which:
a) at least one splicing event is more abundant at high MOI cultures than at low MOI cultures; and/or
b) at least one splicing event appears in at least 2, 3, 4, 5, 6, 7, 8 or 9 different cell lines; and/or,
c) at least one splicing event is found in at least 3 of at least 12, 24 or 36 independent replicates, after at least 5, 10, 15 or 20 passages; and/or,
d) at least one splicing event is a deletion event and the nucleotide size of the deletion is at least 40, 42, 50, 100, 150, 200, 400, 600 or 1000 nucleotides; and/or,
e) an open reading frame in the DVG is maintained; and/or,
f) the structural domains and functions necessary for viral replication, are maintained in the DVG; and/or
g) the DVG comprises at least one mutation that reduces the self-replicative capacity of the reference infectious virus.

4. The method according to any one of claims 1 to 3, wherein the DVG is characterized by an in vitro inhibitory activity of at least 50%, 60%, 70%, 80% or 90% against the reference infectious virus.

5. The method according to any one of claims 1 to 4, wherein the reference infectious virus has a mutator phenotype.

6. The method according to any one of claims 1 to 5, wherein the reference infectious virus is a Chikungunya virus (CHIKV), Zika virus (ZIKV), Enterovirus 71 (EV71), Rhinovirus (RV), Yellow Fever virus (YFV),West Nile Virus (WNV) or Coronavirus (CV).

7. The method according to any one of claims 1 to 5, wherein the reference infectious virus is selected from the group consisting of: CHIKV Indian Ocean lineage (GenBank accession no. AM258994), CHIKV Caribbean strain (GenBank accession no. LN898104.1), ZIKV African strain MR766 (KY989511.1), EV71 Sep006 (GenBank: KX197462.1), RV-A01a (NC_038311.1), RV-A16 (L24917.1), RV-B14 (L05355.1), RV-C15 (GU219984.1), West Nile virus Israel 1998 and YFV strain, Yellow Fever Virus Asibi (YF-Asibi) strain,Yellow Fever Virus vaccine (YF-17D) strain, and Coronavirus SARS-CoV-2 strain.

8. The method according to any one of claims 1 to 7, wherein the cells are a mammalian cell line selected from the group consisting of: a cell line derived from African green monkey kidney cells (optionally Vero, optionally Vero-E6 cell line), a cell line derived from human muscle (optionally RD cell line), a cell line derived from baby hamster kidneys (optionally BHK cell line), a cell line derived from human embryonic kidney cells (optionally HEK293T cell line) a cell line derived from liver carcinoma cells (optionally Huh7 cell line), and a cell line derived from cervical adenocarcinoma (optionally H1-HeLa, optionally HeLa-E8 cell line).

9. The method according any one of claims 1 to 7, wherein the cells are mosquito a cell line selected from the group consisting of: a cell line derived from Aedes aegypti (optionally Aag2 cell line), a cell derived from Aedes albopictus (optionally C6/36 cell line) and a cell line derived from Aedes albopictus (optionally U4.4 cell line).

10. The method according to any one of claims 1 to 9, wherein the low MOI for infection is from 0.001 to 0.1 PFU/cell, in particular from 0.01 to 0.1 PFU/cell.

11. The method according to any one of claims 1 to 10, wherein the high MOI for infection is from 1 PFU/cell to 100 PFU/cell, in particular from 5 to 50 PFU/cell or 5 to 20 PFU/cell.

12. A DVG produced by the method of any one of claims 1 to 11.

13. A DVG comprising or consisting of a nucleotide sequence selected from the group consisting of: SEQ ID NO: 1 (DG1 : EV71 DVG 293-390), SEQ ID NO: 2 (DG2 : EV71 DVG 294-404), SEQ ID NO: 3 (DG3 : EV71 DVG 1746-2895), SEQ ID NO: 4 (DG4 : EV71 DVG 1752-2894), SEQ ID NO: 5 (DG5 : EV71 DVG 1752-2896), SEQ ID NO: 6 (DG6 : EV71 DVG 1880-6487), SEQ ID NO: 7 (DG7 : EV71 DVG 1880-6488), SEQ ID NO: 8 (DG8 : EV71 DVG 3513-6516), SEQ ID NO: 9 (DG9 : EV71 DVG 5475-5634), SEQ ID NO: 10 (DG10: EV71 DVG 5610-6876), SEQ ID NO: 11 (DG11 : EV71 DVG 5610-6877), SEQ ID NO: 12 (DG12: EV71 DVG 5746-5821), SEQ ID NO: 13 (DG13 : EV71 DVG 6322-6356), SEQ ID NO: 14 (DG14: EV71 DVG 6322-6358), SEQ ID NO: 15 (DG15: EV71 DVG 6728-6779), SEQ ID NO: 16 (DG16: EV71 DVG 6966-7012), SEQ ID NO: 17 (DG17: EV71 DVG 6966-7014), SEQ ID NO: 18 (DG18: EV71 DVG 7098-7122), SEQ ID NO: 19 (DG19: EV71 DVG 7165-7200), SEQ ID NO: 20 (DG20: EV71 DVG 7165-7201), SEQ ID NO: 21 (DG21: EV71 DVG 7238-7292), SEQ ID NO: 22 (ZIKV DVG-A), SEQ ID NO: 23 (ZIKV DVG-B), SEQ ID NO: 24 (ZIKV DVG-C), SEQ ID NO: 25 (ZIKV DVG-D), SEQ ID NO: 26 (ZIKV DVG-E), SEQ ID NO: 27 (ZIKV DVG-F), SEQ ID NO: 28 (ZIKV DVG-G), SEQ ID NO: 29 (ZIKV DVG-H), SEQ ID NO: 30 (ZIKV DVG-I), SEQ ID NO: 31 (ZIKV DVG-J), SEQ ID NO: 32 (ZIKV DVG-K), SEQ ID NO: 33 (ZIKV DVG-L), SEQ ID NO: 34 (CHIKV DVG-IV1), SEQ ID NO: 35 (CHIKV DVG-IV2), SEQ ID NO: 36 (CHIKV DVG-IV3), SEQ ID NO: 37 (CHIKV DVG-IV4), SEQ ID NO: 38 (CHIKV DVG-IH1), SEQ ID NO: 39 (CHIKV DVG-IU1), SEQ ID NO: 40 (CHIKV DVG-CV1), SEQ ID NO: 41 (CHIKV DVG-CV2), SEQ ID NO: 42 (CHIKV DVG-CV3), SEQ ID NO: 43 (CHIKV DVG-CV4), SEQ ID NO: 44 (CHIKV DVG-CH1), SEQ ID NO: 45 (CHIKV DVG-CH2), SEQ ID NO: 46 (CHIKV DVG-CH3), SEQ ID NO: 47 (CHIKV DVG-CM1), SEQ ID NO: 48 (CHIKV DVG-CU1), SEQ ID NO: 49 (CHIKV DVG-CU2), SEQ ID NO: 50 (CHIKV DVG-CA1), SEQ ID NO: 51 (CHIKV DVG-CA2), SEQ ID NO: 52 (CHIKV DVG-CA3), SEQ ID NO: 53 (CHIKV DVG-CA4), SEQ ID NO: 55 (RV DVG A01a-TIP-01), SEQ ID NO: 56 (RV DVG A01a-TIP-02), SEQ ID NO: 57 (RVDVG A01a-TIP-03), SEQ ID NO: 58 (RV DVG A01a-TIP-04), SEQ ID NO: 59 (RVDVG A01a-TIP-05), SEQ ID NO: 60 (RV DVG A01a-TIP-06), SEQ ID NO: 62 (RVDVG A16-TIP-01), SEQ ID NO: 63 (RV DVG A16-TIP-02), SEQ ID NO: 64 (RV DVG A16-TIP-03), SEQ ID NO: 65 (RV DVG A16-TIP-04), SEQ ID NO: 66 (RV DVG A16-TIP-05), SEQ ID NO: 89 (RV DVG C15-TIP-01), SEQ ID NO: 90 (RV DVG C15-TIP-02), SEQ ID NO: 91 (RV DVG C15-TIP-03), SEQ ID NO: 92 (RV DVG C15-TIP-04), SEQ ID NO: 68 (RV DVG B14-TIP-01), SEQ ID NO: 69 (RV DVG B14-TIP-02), SEQ ID NO: 70 (RV DVG B14-TIP-03), SEQ ID NO: 71 (RV DVG B14-TIP-04), SEQ ID NO: 72 (RV DVG B14-TIP-05), SEQ ID NO: 73 (RV DVG B14-TIP-06), SEQ ID NO: 74 (RV DVG B14-TIP-07), SEQ ID NO: 75 (RV DVG B14-TIP-08), SEQ ID NO: 76 (RV DVG B14-TIP-09), SEQ ID NO: 77 (RV DVG B14-TIP-10), SEQ ID NO: 78 (RV DVG B14-TIP-11), SEQ ID NO: 79 (RV DVG B14-TIP-12), SEQ ID NO: 80 (RV DVG B14-TIP-13), SEQ ID NO: 81 (RV DVG B14-TIP-14), SEQ ID NO: 82 (RV DVG B14-TIP-15), SEQ ID NO: 83 (RV DVG B14-TIP-16), SEQ ID NO: 84 (RV DVG B14-TIP-17), SEQ ID NO: 85 (RV DVG B14-TIP-18), SEQ ID NO: 86 (RV DVG B14-TIP-19), SEQ ID NO: 87 (RV DVG B14-TIP-20), SEQ ID NO:93 (YFV DVG-A), SEQ ID NO: 94 (YFV DVG-B), SEQ ID NO: 95 (YFV DVG-C), SEQ ID NO: 96 (YFV DVG-D), SEQ ID NO: 97 (YFV DVG-E), SEQ ID NO: 98 (YFV DVG-F), SEQ ID NO: 99 (YFV DVG-G), SEQ ID NO: 100 (YFV DVG-H), SEQ ID NO: 101 (YFV DVG-I), SEQ ID NO: 102 (YFV DVG-J), SEQ ID NO: 103 (YFV DVG-K), SEQ ID NO: 104 (YFV DVG-L), SEQ ID NO:105 (WNV DVG-1), SEQ ID NO: 106 (WNV DVG-2), SEQ ID NO: 107 (WNV DVG-3), SEQ ID NO: 108 (WNV DVG-4), SEQ ID NO: 109 (WNV DVG-5), SEQ ID NO: 110 (WNV DVG-6), SEQ ID NO: 111 (SARS-CoV-2 DVG-1), SEQ ID NO: 112 (SARS-CoV-2 DVG_2) and SEQ ID NO: 113 (SARS-CoV-2 DVG_3), or a nucleotide sequence having at least 70% identity, more preferably at least 80% identity ; more preferably at least 90% identity, more preferably at least 91% identity, more preferably at least 92% identity, more preferably at least 93% identity, more preferably at least 94% identity, more preferably at least 95% identity, more preferably at least 96% identity, more preferably at least 97% identity, more preferably at least 98% identity, or more preferably at least 99% identity with one of these sequences.

14. A defective interfering particle comprising the DVG of claim 12 or claim 13.

15. A method of treating a viral infection in a subject, comprising administering an efficient therapeutic amount of at least one DVG or defective interfering particle according to any one of claims 12 to 14.

16. The method according to claim 15, wherein the DVG is administered as a naked RNA.

17. The method according to claim 15, wherein at least one DVG is a defective interfering CHIKV genome.

18. The method according to claim 17, wherein at least one defective interfering CHIKV genome comprises or consists of a nucleotide sequence selected from the group consisting of: SEQ ID NO: 34 (CHIKV DVG-IV1), SEQ ID NO: 35 (CHIKV DVG-IV2), SEQ ID NO: 36 (CHIKV DVG-IV3), SEQ ID NO: 37 (CHIKV DVG-IV4), SEQ ID NO: 38 (CHIKV DVG-IH1), SEQ ID NO: 39 (CHIKV DVG-IU1), SEQ ID NO: 40 (CHIKV DVG-CV1), SEQ ID NO: 41 (CHIKV DVG-CV2), SEQ ID NO: 42 (CHIKV DVG-CV3), SEQ ID NO: 43 (CHIKV DVG-CV4), SEQ ID NO: 44 (CHIKV DVG-CH1), SEQ ID NO: 45 (CHIKV DVG-CH2), SEQ ID NO: 46 (CHIKV DVG-CH3), SEQ ID NO: 47 (CHIKV DVG-CM1), SEQ ID NO: 48 (CHIKV DVG-CU1), SEQ ID NO: 49 (CHIKV DVG-CU2), SEQ ID NO: 50 (CHIKV DVG-CA1), SEQ ID NO: 51 (CHIKV DVG-CA2), SEQ ID NO: 52 (CHIKV DVG-CA3) and SEQ ID NO: 53 (CHIKV DVG-CA4).

19. The method according to claim 15, wherein at least one defective interfering genome is a defective interfering ZIKV genome.

20. The method according to claim 19, wherein at least one interfering ZIKV genome comprises or consists of a nucleotide sequence selected from the group consisting of: SEQ ID NO: 22 (ZIKV DVG-A), SEQ ID NO: 23 (ZIKV DVG-B), SEQ ID NO: 24 (ZIKV DVG-C), SEQ ID NO: 25 (ZIKV DVG-D), SEQ ID NO: 26 (ZIKV DVG-E), SEQ ID NO: 27 (ZIKV DVG-F), SEQ ID NO: 28 (ZIKV DVG-G), SEQ ID NO: 29 (ZIKV DVG-H), SEQ ID NO: 30 (ZIKV DVG-I), SEQ ID NO: 31 (ZIKV DVG-J), SEQ ID NO: 32 (ZIKV DVG-K) and SEQ ID NO: 33 (ZIKV DVG-L), in particular SEQ ID NO: 32 (ZIKV DVG-K).

21. The method according to claim 15, wherein at least one defective interfering genome is a defective interfering EV71 genome.

22. The method according to claim 21, wherein at least one defective interfering EV71 genome comprises or consists of a nucleotide sequence selected from the group consisting of: SEQ ID NO: 1 (DG1 : EV71 DVG 293-390), SEQ ID NO: 2 (DG2 : EV71 DVG 294-404), SEQ ID NO: 3 (DG3 : EV71 DVG 1746-2895), SEQ ID NO: 4 (DG4 : EV71 DVG 1752-2894), SEQ ID NO: 5 (DG5 : EV71 DVG 1752-2896), SEQ ID NO: 6 (DG6 : EV71 DVG 1880-6487), SEQ ID NO: 7 (DG7 : EV71 DVG 1880-6488), SEQ ID NO: 8 (DG8 : EV71 DVG 3513-6516), SEQ ID NO: 9 (DG9 : EV71 DVG 5475-5634), SEQ ID NO: 10 (DG10: EV71 DVG 5610-6876), SEQ ID NO: 11 (DG11 : EV71 DVG 5610-6877), SEQ ID NO: 12 (DG12: EV71 DVG 5746-5821), SEQ ID NO: 13 (DG13 : EV71 DVG 6322-6356), SEQ ID NO: 14 (DG14: EV71 DVG 6322-6358), SEQ ID NO: 15 (DG15: EV71 DVG 6728-6779), SEQ ID NO: 16 (DG16: EV71 DVG 6966-7012), SEQ ID NO: 17 (DG17: EV71 DVG 6966-7014), SEQ ID NO: 18 (DG18: EV71 DVG 7098-7122), SEQ ID NO: 19 (DG19: EV71 DVG 7165-7200), SEQ ID NO: 20 (DG20: EV71 DVG 7165-7201) and SEQ ID NO: 21 (DG21: EV71 DVG 7238-7292).

23. The method according to claim 15, wherein at least one defective interfering genome is a defective interfering RV genome.

24. The method according to claim 23, wherein at least one defective interfering RV genome comprises or consists of a nucleotide sequence selected from the group consisting of: SEQ ID NO: 55 (RV DVG A01a-TIP-01), SEQ ID NO: 56 (RV DVG A01a-TIP-02), SEQ ID NO: 57 (RV DVG A01a-TIP-03), SEQ ID NO: 58 (RV DVG A01a-TIP-04), SEQ ID NO: 59 (RV DVG A01a-TIP-05), SEQ ID NO: 60 (RV DVG A01a-TIP-06), SEQ ID NO: 62 (RV DVG A16-TIP-01), SEQ ID NO: 63 (RV DVG A16-TIP-02), SEQ ID NO: 64 (RV DVG A16-TIP-03), SEQ ID NO: 65 (RV DVG A16-TIP-04), SEQ ID NO: 66 (RV DVG A16-TIP-05), SEQ ID NO: 89 (RV DVG C15-TIP-01), SEQ ID NO: 90 (RV DVG C15-TIP-02), SEQ ID NO: 91 (RV DVG C15-TIP-03), SEQ ID NO: 92 (RV DVG C15-TIP-04), SEQ ID NO: 68 (RV DVG B14-TIP-01), SEQ ID NO: 69 (RV DVG B14-TIP-02), SEQ ID NO: 70 (RV DVG B14-TIP-03), SEQ ID NO: 71 (RV DVG B14-TIP-04), SEQ ID NO: 72 (RV DVG B14-TIP-05), SEQ ID NO: 73 (RV DVG B14-TIP-06), SEQ ID NO: 74 (RV DVG B14-TIP-07), SEQ ID NO: 75 (RV DVG B14-TIP-08), SEQ ID NO: 76 (RV DVG B14-TIP-09), SEQ ID NO: 77 (RV DVG B14-TIP-10), SEQ ID NO: 78 (RV DVG B14-TIP-11), SEQ ID NO: 79 (RV DVG B14-TIP-12), SEQ ID NO: 80 (RV DVG B14-TIP-13), SEQ ID NO: 81 (RV DVG B14-TIP-14), SEQ ID NO: 82 (RV DVG B14-TIP-15), SEQ ID NO: 83 (RV DVG B14-TIP-16), SEQ ID NO: 84 (RV DVG B14-TIP-17), SEQ ID NO: 85 (RV DVG B14-TIP-18), SEQ ID NO: 86 (RV DVG B14-TIP-19) and SEQ ID NO: 87 (RV DVG B14-TIP-20).

25. The method according to claim 15, wherein the at least one defective interfering genome is a defective interfering YFV genome.

26. The method according to claim 25, wherein the at least one defective interfering YFV genome comprises or consists of a nucleotide sequence selected from the group consisting of: SEQ ID NO: 93 (YFV DVG-A), SEQ ID NO: 94 (YFV DVG-B), SEQ ID NO: 95 (YFV DVG-C), SEQ ID NO: 96 (YFV DVG-D), SEQ ID NO: 97 (YFV DVG-E), SEQ ID NO: 98 (YFV DVG-F), SEQ ID NO: 99 (YFV DVG-G), SEQ ID NO: 100 (YFV DVG-H), SEQ ID NO: 101 (YFV DVG-I), SEQ ID NO: 102 (YFV DVG-J), SEQ ID NO: 103 (YFV DVG-K) and SEQ ID NO: 104 (YFV DVG-L).

27. The method according to claim 15, wherein the at least one defective interfering genome is a defective interfering WNV genome.

28. The method according to claim 27, wherein the at least one defective interfering WNV genome comprises or consists of a nucleotide sequence selected from the group consisting of: SEQ ID NO:105 (WNV DVG-1), SEQ ID NO: 106 (WNV DVG-2), SEQ ID NO: 107 (WNV DVG-3), SEQ ID NO: 108 (WNV DVG-4), SEQ ID NO: 109 (WNV DVG-5) and SEQ ID NO: 110 (WNV DVG-6).

29. The method according to claim 15, wherein the at least one defective interfering genome is a defective interfering CV genome.

30. The method according to claim 29, wherein the at least one defective interfering CV genome comprises or consists of a nucleotide sequence selected from the group consisting of: SEQ ID NO: 111 (SARS-CoV-2 DVG_1), SEQ ID NO: 112 (SARS-CoV-2 DVG_2) and SEQ ID NO: 113 (SARS-CoV-2 DVG_3).

31. The defective interfering genome DVG or defective interfering particle according to any one of claims 12 to 14 for use in a method of treatment of CHIKV infection to a subject, in particular wherein the defective interfering genome comprises or consists of a nucleotide sequence selected from the group consisting of: SEQ ID NO: 34 (CHIKV DVG-IV1), SEQ ID NO: 35 (CHIKV DVG-IV2), SEQ ID NO: 36 (CHIKV DVG-IV3), SEQ ID NO: 37 (CHIKV DVG-IV4), SEQ ID NO: 38 (CHIKV DVG-IH1), SEQ ID NO: 39 (CHIKV DVG-IU1), SEQ ID NO: 40 (CHIKV DVG-CV1), SEQ ID NO: 41 (CHIKV DVG-CV2), SEQ ID NO: 42 (CHIKV DVG-CV3), SEQ ID NO: 43 (CHIKV DVG-CV4), SEQ ID NO: 44 (CHIKV DVG-CH1), SEQ ID NO: 45 (CHIKV DVG-CH2), SEQ ID NO: 46 (CHIKV DVG-CH3), SEQ ID NO: 47 (CHIKV DVG-CM1), SEQ ID NO: 48 (CHIKV DVG-CU1), SEQ ID NO: 49 (CHIKV DVG-CU2), SEQ ID NO: 50 (CHIKV DVG-CA1), SEQ ID NO: 51 (CHIKV DVG-CA2), SEQ ID NO: 52 (CHIKV DVG-CA3) and SEQ ID NO: 53 (CHIKV DVG-CA4).

32. The defective interfering genome DVG or defective interfering particle according to any one of claims 12 to 14 for use in a method of treatment of ZIKV infection to a subject, in particular wherein the defective interfering genome comprises or consists of a nucleotide sequence selected from the group consisting of: SEQ ID NO: 22 (ZIKV DVG-A), SEQ ID NO: 23 (ZIKV DVG-B), SEQ ID NO: 24 (ZIKV DVG-C), SEQ ID NO: 25 (ZIKV DVG-D), SEQ ID NO: 26 (ZIKV DVG-E), SEQ ID NO: 27 (ZIKV DVG-F), SEQ ID NO: 28 (ZIKV DVG-G), SEQ ID NO: 29 (ZIKV DVG-H), SEQ ID NO: 30 (ZIKV DVG-I), SEQ ID NO: 31 (ZIKV DVG-J), SEQ ID NO: 32 (ZIKV DVG-K) and SEQ ID NO: 33 (ZIKV DVG-L).

33. The defective interfering genome DVG or defective interfering particle according to any one of claims 12 to 14 for use in a method of treatment of EV71 infection to a subject, in particular wherein the defective interfering genome comprises or consists of a nucleotide sequence selected from the group consisting of: SEQ ID NO: 1 (DG1 : EV71 DVG 293-390), SEQ ID NO: 2 (DG2 : EV71 DVG 294-404), SEQ ID NO: 3 (DG3 : EV71 DVG 1746-2895), SEQ ID NO: 4 (DG4 : EV71 DVG 1752-2894), SEQ ID NO: 5 (DG5 : EV71 DVG 1752-2896), SEQ ID NO: 6 (DG6 : EV71 DVG 1880-6487), SEQ ID NO: 7 (DG7 : EV71 DVG 1880-6488), SEQ ID NO: 8 (DG8 : EV71 DVG 3513-6516), SEQ ID NO: 9 (DG9 : EV71 DVG 5475-5634), SEQ ID NO: 10 (DG10: EV71 DVG 5610-6876), SEQ ID NO: 11 (DG11 : EV71 DVG 5610-6877), SEQ ID NO: 12 (DG12: EV71 DVG 5746-5821), SEQ ID NO: 13 (DG13 : EV71 DVG 6322-6356), SEQ ID NO: 14 (DG14: EV71 DVG 6322-6358), SEQ ID NO: 15 (DG15: EV71 DVG 6728-6779), SEQ ID NO: 16 (DG16: EV71 DVG 6966-7012), SEQ ID NO: 17 (DG17: EV71 DVG 6966-7014), SEQ ID NO: 18 (DG18: EV71 DVG 7098-7122), SEQ ID NO: 19 (DG19: EV71 DVG 7165-7200), SEQ ID NO: 20 (DG20: EV71 DVG 7165-7201) and SEQ ID NO: 21 (DG21: EV71 DVG 7238-7292).

34. The defective interfering genome DVG or defective interfering particle according to any one of claims 12 to 14 for use in a method of treatment of RV infection to a subject, in particular wherein the defective interfering genome comprises or consists of a nucleotide sequence selected from the group consisting of: SEQ ID NO: 55 (RV DVG A01a-TIP-01), SEQ ID NO: 56 (RV DVG A01a-TIP-02), SEQ ID NO: 57 (RV DVG A01a-TIP-03), SEQ ID NO: 58 (RV DVG A01a-TIP-04), SEQ ID NO: 59 (RV DVG A01a-TIP-05), SEQ ID NO: 60 (RV DVG A01a-TIP-06), SEQ ID NO: 62 (RV DVG A16-TIP-01), SEQ ID NO: 63 (RV DVG A16-TIP-02), SEQ ID NO: 64 (RV DVG A16-TIP-03), SEQ ID NO: 65 (RV DVG A16-TIP-04), SEQ ID NO: 66 (RV DVG A16-TIP-05), SEQ ID NO: 89 (RV DVG C15-TIP-01), SEQ ID NO: 90 (RV DVG C15-TIP-02), SEQ ID NO: 91 (RV DVG C15-TIP-03), SEQ ID NO: 92 (RV DVG C15-TIP-04), SEQ ID NO: 68 (RV DVG B14-TIP-01), SEQ ID NO: 69 (RV DVG B14-TIP-02), SEQ ID NO: 70 (RV DVG B14-TIP-03), SEQ ID NO: 71 (RV DVG B14-TIP-04), SEQ ID NO: 72 (RV DVG B14-TIP-05), SEQ ID NO: 73 (RV DVG B14-TIP-06), SEQ ID NO: 74 (RV DVG B14-TIP-07), SEQ ID NO: 75 (RV DVG B14-TIP-08), SEQ ID NO: 76 (RV DVG B14-TIP-09), SEQ ID NO: 77 (RV DVG B14-TIP-10), SEQ ID NO: 78 (RV DVG B14-TIP-11), SEQ ID NO: 79 (RV DVG B14-TIP-12), SEQ ID NO: 80 (RV DVG B14-TIP-13), SEQ ID NO: 81 (RVDVGB14-TIP-14), SEQ ID NO: 82 (RV DVG B14-TIP-15), SEQ ID NO: 83 (RV DVG B14-TIP-16), SEQ ID NO: 84 (RV DVG B14-TIP-17), SEQ ID NO: 85 (RV DVG B14-TIP-18), SEQ ID NO: 86 (RV DVG B14-TIP-19) and SEQ ID NO: 87 (RV DVG B14-TIP-20).

35. The defective interfering genome DVG or defective interfering particle according to any one of claims 12 to 14 for use in a method of treatment of YFV infection to a subject, in particular wherein the defective interfering genome comprises or consists of a nucleotide sequence selected from the group consisting of: SEQ ID NO: 93 (YFV DVG-A), SEQ ID NO: 94 (YFV DVG-B), SEQ ID NO: 95 (YFV DVG-C), SEQ ID NO: 96 (YFV DVG-D), SEQ ID NO: 97 (YFV DVG-E), SEQ ID NO: 98 (YFV DVG-F), SEQ ID NO: 99 (YFV DVG-G), SEQ ID NO: 100 (YFV DVG-H), SEQ ID NO: 101 (YFV DVG-I), SEQ ID NO: 102 (YFV DVG-J), SEQ ID NO: 103 (YFV DVG-K) and SEQ ID NO: 104 (YFV DVG-L).

36. The defective interfering genome DVG or defective interfering particle according to any one of claims 12 to 14 for use in a method of treatment of WNV infection to a subject, in particular wherein the defective interfering genome comprises or consists of a nucleotide sequence selected from the group consisting of: SEQ ID NO:105 (WNV DVG-1), SEQ ID NO: 106 (WNV DVG-2), SEQ ID NO: 107 (WNV DVG-3), SEQ ID NO: 108 (WNV DVG-4), SEQ ID NO: 109 (WNV DVG-5) and SEQ ID NO: 110 (WNV DVG-6).

37. The defective interfering genome DVG or defective interfering particle according to any one of claims 12 to 14 for use in a method of treatment of CV infection to a subject, in particular a SARS-CoV-2 infection to a subject, in particular wherein the defective interfering genome comprises or consists of a nucleotide sequence selected from the group consisting of: SEQ ID NO: 111 (SARS-CoV-2 DVG_1), SEQ ID NO: 112 (SARS-CoV-2 DVG_2) and SEQ ID NO: 113 (SARS-CoV-2 DVG_3).

38. A pharmaceutical, immunogenic, or therapeutic composition, comprising at least one DVG according to claim 12 or claim 13, and a pharmaceutically acceptable carrier.

39. A pharmaceutical, immunogenic, or therapeutic composition, comprising at least one defective interfering particle according to claim 14, and a pharmaceutically acceptable carrier.

40. A vaccine comprising the composition according to claim 38 or 39.

41. Use of a DVG according to claim 12 or 13, or a defective interfering particle according to claim 14, for the preparation of a drug for the treatment of a patient infected with a target virus of the DVG or defective interfering particle.

42. Use of a DVG according to claim 12 or 13, or a defective interfering particle according to claim 14, for the preparation of a drug for the treatment of a patient infected with CHIKV.

43. Use of a DVG according to claim 12 or 13, or a defective interfering particle according to claim 14, for the preparation of a drug for the treatment of a patient infected with ZIKV.

44. Use of a DVG according to claim 12 or 13, or a defective interfering particle according to claim 14, for the preparation of a drug for the treatment of a patient infected with EV71.

45. Use of a DVG according to claim 12 or 13, or a defective interfering particle according to claim 14, for the preparation of a drug for the treatment of a patient infected with RV.

46. Use of a DVG according to claim 12 or 13, or a defective interfering particle according to claim 14, for the preparation of a drug for the treatment of a patient infected with YFV.

47. Use of a DVG according to claim 12 or 13, or a defective interfering particle according to claim 14, for the preparation of a drug for the treatment of a patient infected with WNV.

48. Use of a DVG according to claim 12 or 13, or a defective interfering particle according to claim 14, for the preparation of a drug for the treatment of a patient infected with CV, in particular SARS-CoV-2.

49. A polynucleotide comprising or consisting of a nucleotide sequence selected from the group consisting of: SEQ ID NO: 1 (DG1 : EV71 DVG 293-390), SEQ ID NO: 2 (DG2 : EV71 DVG 294-404), SEQ ID NO: 3 (DG3 : EV71 DVG 1746-2895), SEQ ID NO: 4 (DG4 : EV71 DVG 1752-2894), SEQ ID NO: 5 (DG5 : EV71 DVG 1752-2896), SEQ ID NO: 6 (DG6 : EV71 DVG 1880-6487), SEQ ID NO: 7 (DG7 : EV71 DVG 1880-6488), SEQ ID NO: 8 (DG8 : EV71 DVG 3513-6516), SEQ ID NO: 9 (DG9 : EV71 DVG 5475-5634), SEQ ID NO: 10 (DG10: EV71 DVG 5610-6876), SEQ ID NO: 11 (DG11 : EV71 DVG 5610-6877), SEQ ID NO: 12 (DG12: EV71 DVG 5746-5821), SEQ ID NO: 13 (DG13 : EV71 DVG 6322-6356), SEQ ID NO: 14 (DG14: EV71 DVG 6322-6358), SEQ ID NO: 15 (DG15: EV71 DVG 6728-6779), SEQ ID NO: 16 (DG16: EV71 DVG 6966-7012), SEQ ID NO: 17 (DG17: EV71 DVG 6966-7014), SEQ ID NO: 18 (DG18: EV71 DVG 7098-7122), SEQ ID NO: 19 (DG19: EV71 DVG 7165-7200), SEQ ID NO: 20 (DG20: EV71 DVG 7165-7201), SEQ ID NO: 21 (DG21: EV71 DVG 7238-7292), SEQ ID NO: 22 (ZIKV DVG-A), SEQ ID NO: 23 (ZIKV DVG-B), SEQ ID NO: 24 (ZIKV DVG-C), SEQ ID NO: 25 (ZIKV DVG-D), SEQ ID NO: 26 (ZIKV DVG-E), SEQ ID NO: 27 (ZIKV DVG-F), SEQ ID NO: 28 (ZIKV DVG-G), SEQ ID NO: 29 (ZIKV DVG-H), SEQ ID NO: 30 (ZIKV DVG-I), SEQ ID NO: 31 (ZIKV DVG-J), SEQ ID NO: 32 (ZIKV DVG-K), SEQ ID NO: 33 (ZIKV DVG-L), SEQ ID NO: 34 (CHIKV DVG-IV1), SEQ ID NO: 35 (CHIKV DVG-IV2), SEQ ID NO: 36 (CHIKV DVG-IV3), SEQ ID NO: 37 (CHIKV DVG-IV4), SEQ ID NO: 38 (CHIKV DVG-IH1), SEQ ID NO: 39 (CHIKV DVG-IU1), SEQ ID NO: 40 (CHIKV DVG-CV1), SEQ ID NO: 41 (CHIKV DVG-CV2), SEQ ID NO: 42 (CHIKV DVG-CV3), SEQ ID NO: 43 (CHIKV DVG-CV4), SEQ ID NO: 44 (CHIKV DVG-CH1), SEQ ID NO: 45 (CHIKV DVG-CH2), SEQ ID NO: 46 (CHIKV DVG-CH3), SEQ ID NO: 47 (CHIKV DVG-CM1), SEQ ID NO: 48 (CHIKV DVG-CU1), SEQ ID NO: 49 (CHIKV DVG-CU2), SEQ ID NO: 50 (CHIKV DVG-CA1), SEQ ID NO: 51 (CHIKV DVG-CA2), SEQ ID NO: 52 (CHIKV DVG-CA3), SEQ ID NO: 53 (CHIKV DVG-CA4), SEQ ID NO: 55 (RV DVG A01a-TIP-01), SEQ ID NO: 56 (RV DVG A01a-TIP-02), SEQ ID NO: 57 (RV DVG A01a-TIP-03), SEQ ID NO: 58 (RV DVG A01a-TIP-04), SEQ ID NO: 59 (RV DVG A01a-TIP-05), SEQ ID NO: 60 (RV DVG A01a-TIP-06), SEQ ID NO: 62 (RV DVG A16-TIP-01), SEQ ID NO: 63 (RV DVG A16-TIP-02), SEQ ID NO: 64 (RV DVG A16-TIP-03), SEQ ID NO: 65 (RV DVG A16-TIP-04), SEQ ID NO: 66 (RV DVG A16-TIP-05), SEQ ID NO: 89 (RV DVG C15-TIP-01), SEQ ID NO: 90 (RV DVG C15-TIP-02), SEQ ID NO: 91 (RV DVG C15-TIP-03), SEQ ID NO: 92 (RV DVG C15-TIP-04), SEQ ID NO: 68 (RV DVG B14-TIP-01), SEQ ID NO: 69 (RV DVG B14-TIP-02), SEQ ID NO: 70 (RV DVG B14-TIP-03), SEQ ID NO: 71 (RV DVG B14-TIP-04), SEQ ID NO: 72 (RV DVG B14-TIP-05), SEQ ID NO: 73 (RV DVG B14-TIP-06), SEQ ID NO: 74 (RV DVG B14-TIP-07), SEQ ID NO: 75 (RV DVG B14-TIP-08), SEQ ID NO: 76 (RV DVG B14-TIP-09), SEQ ID NO: 77 (RV DVG B14-TIP-10), SEQ ID NO: 78 (RV DVG B14-TIP-11), SEQ ID NO: 79 (RV DVG B14-TIP-12), SEQ ID NO: 80 (RV DVG B14-TIP-13), SEQ ID NO: 81 (RV DVG B14-TIP-14), SEQ ID NO: 82 (RV DVG B14-TIP-15), SEQ ID NO: 83 (RV DVG B14-TIP-16), SEQ ID NO: 84 (RV DVG B14-TIP-17), SEQ ID NO: 85 (RV DVG B14-TIP-18), SEQ ID NO: 86 (RV DVG B14-TIP-19), SEQ ID NO: 87 (RV DVG B14-TIP-20), SEQ ID NO:93 (YFV DVG-A), SEQ ID NO: 94 (YFV DVG-B), SEQ ID NO: 95 (YFV DVG-C), SEQ ID NO: 96 (YFV DVG-D), SEQ ID NO: 97 (YFV DVG-E), SEQ ID NO: 98 (YFV DVG-F), SEQ ID NO: 99 (YFV DVG-G), SEQ ID NO: 100 (YFV DVG-H), SEQ ID NO: 101 (YFV DVG-I), SEQ ID NO: 102 (YFV DVG-J), SEQ ID NO: 103 (YFV DVG-K), SEQ ID NO: 104 (YFVDVG-L), SEQ ID NO:105 (WNV DVG-1), SEQ ID NO: 106 (WNV DVG-2), SEQ ID NO: 107 (WNV DVG-3), SEQ ID NO: 108 (WNV DVG-4), SEQ ID NO: 109 (WNV DVG-5), SEQ ID NO: 110 (WNV DVG-6), SEQ ID NO: 111 (SARS-CoV-2 DVG_1), SEQ ID NO: 112 (SARS-CoV-2 DVG_2) and SEQ ID NO: 113 (SARS-CoV-2 DVG_3), or a polynucleotide having at least 70% identity, more preferably at least 80% identity; more preferably at least 90% identity, more preferably at least 91% identity, more preferably at least 92% identity, more preferably at least 93% identity, more preferably at least 94% identity, more preferably at least 95% identity, more preferably at least 96% identity, more preferably at least 97% identity, more preferably at least 98% identity, or more preferably at least 99% identity with one of these sequences..

50. An expression vector or a plasmid comprising the polynucleotide according to claim 49.

51. A cell line producing the DVG according to claim 12 or 13.
